United States Patent Application Publication US 2022/0098586 A1 - sequence listing, part 3

SEQ ID NO: 18708 - DNA, 13 bp, Artificial Sequence
  source: /note="Description of Artificial Sequence: Synthetic oligonucleotide"
  source: /note="Description of Combined DNA/RNA Molecule: Synthetic oligonucleotide"
  source: /note="DNA/RNA"
  source: /note="5' tri-ethylene glycol (TEG)"
  modified_base (1)..(1): bicyclic nucleic acid (BNA)
  modified_base (2)..(2): bicyclic nucleic acid (BNA)
  modified_base (7)..(7): 5-methyl modified nucleotide
  modified_base (11)..(11): 5-methyl modified nucleotide
  modified_base (12)..(12): 5-methyl modified nucleotide
  source: /note="3' tri-ethylene glycol (TEG)"
taaguucugucca

SEQ ID NO: 18709 - DNA, 12 bp, Artificial Sequence
  source: /note="Description of Artificial Sequence: Synthetic oligonucleotide"
  source: /note="Description of Combined DNA/RNA Molecule: Synthetic oligonucleotide"
  source: /note="DNA/RNA"
  source: /note="5' tri-ethylene glycol (TEG)"
  modified_base (1)..(1): bicyclic nucleic acid (BNA)
  modified_base (2)..(2): bicyclic nucleic acid (BNA)
  modified_base (7)..(7): 5-methyl modified nucleotide
  modified_base (11)..(11): 5-methyl modified nucleotide
  modified_base (12)..(12): 5-methyl modified nucleotide
  source: /note="3' tri-ethylene glycol (TEG)"
taaguucugucc

SEQ ID NO: 18710 - DNA, 11 bp, Artificial Sequence
  source: /note="Description of Artificial Sequence: Synthetic oligonucleotide"
  source: /note="Description of Combined DNA/RNA Molecule: Synthetic oligonucleotide"
  source: /note="DNA/RNA"
  source: /note="5' tri-ethylene glycol (TEG)"
  modified_base (1)..(1): bicyclic nucleic acid (BNA)
  modified_base (2)..(2): bicyclic nucleic acid (BNA)
  modified_base (7)..(7): 5-methyl modified nucleotide
  modified_base (11)..(11): 5-methyl modified nucleotide
  source: /note="3' tri-ethylene glycol (TEG)"
taaguucuguc

SEQ ID NO: 18711 - DNA, 10 bp, Artificial Sequence
  source: /note="Description of Artificial Sequence: Synthetic oligonucleotide"
  source: /note="Description of Combined DNA/RNA Molecule: Synthetic oligonucleotide"
  source: /note="DNA/RNA"
  source: /note="5' tri-ethylene glycol (TEG)"
  modified_base (1)..(1): bicyclic nucleic acid (BNA)
  modified_base (2)..(2): bicyclic nucleic acid (BNA)
  modified_base (7)..(7): 5-methyl modified nucleotide
  source: /note="3' tri-ethylene glycol (TEG)"
taaguucugu

SEQ ID NO: 18712 - DNA, 9 bp, Artificial Sequence
  source: /note="Description of Artificial Sequence: Synthetic oligonucleotide"
  source: /note="Description of Combined DNA/RNA Molecule: Synthetic oligonucleotide"
  source: /note="DNA/RNA"
  source: /note="5' tri-ethylene glycol (TEG)"
  modified_base (1)..(1): bicyclic nucleic acid (BNA)
  modified_base (2)..(2): bicyclic nucleic acid (BNA)
  modified_base (7)..(7): 5-methyl modified nucleotide
  source: /note="3' tri-ethylene glycol (TEG)"
taaguucug

SEQ ID NO: 18713 - DNA, 8 bp, Artificial Sequence
  source: /note="Description of Artificial Sequence: Synthetic oligonucleotide"
  source: /note="Description of Combined DNA/RNA Molecule: Synthetic oligonucleotide"
  source: /note="DNA/RNA"
  source: /note="5' tri-ethylene glycol (TEG)"
  modified_base (1)..(1): bicyclic nucleic acid (BNA)
  modified_base (2)..(2): bicyclic nucleic acid (BNA)
  modified_base (7)..(7): 5-methyl modified nucleotide
  source: /note="3' tri-ethylene glycol (TEG)"
taaguucu

SEQ ID NO: 18714 - DNA, 20 bp, Artificial Sequence
  source: /note="Description of Artificial Sequence: Synthetic oligonucleotide"
  source: /note="Description of Combined DNA/RNA Molecule: Synthetic oligonucleotide"
  source: /note="DNA/RNA"
  source: /note="5' tri-ethylene glycol (TEG)"
  modified_base (1)..(1): bicyclic nucleic acid (BNA)
  modified_base (2)..(2): bicyclic nucleic acid (BNA)
  modified_base (8)..(8): 5-methyl modified nucleotide
  modified_base (12)..(12): 5-methyl modified nucleotide
  modified_base (13)..(13): 5-methyl modified nucleotide
  modified_base (17)..(17): 5-methyl modified nucleotide
  modified_base (18)..(18): 5-methyl modified nucleotide
  modified_base (19)..(19): 5-methyl modified nucleotide
  source: /note="3' tri-ethylene glycol (TEG)"
gtaaguucuguccaagcccg

SEQ ID NO: 18715 - DNA, 19 bp, Artificial Sequence
  source: /note="Description of Artificial Sequence: Synthetic oligonucleotide"
  source: /note="Description of Combined DNA/RNA Molecule: Synthetic oligonucleotide"
  source: /note="DNA/RNA"
  source: /note="5' tri-ethylene glycol (TEG)"
  modified_base (1)..(1): bicyclic nucleic acid (BNA)
  modified_base (2)..(2): bicyclic nucleic acid (BNA)
  modified_base (8)..(8): 5-methyl modified nucleotide
  modified_base (12)..(12): 5-methyl modified nucleotide
  modified_base (13)..(13): 5-methyl modified nucleotide
  modified_base (17)..(17): 5-methyl modified nucleotide
  modified_base (18)..(18): 5-methyl modified nucleotide
  modified_base (19)..(19): 5-methyl modified nucleotide
  source: /note="3' tri-ethylene glycol (TEG)"
gtaaguucuguccaagccc

SEQ ID NO: 18716 - DNA, 17 bp, Artificial Sequence
  source: /note="Description of Artificial Sequence: Synthetic oligonucleotide"
  source: /note="Description of Combined DNA/RNA Molecule: Synthetic oligonucleotide"
  source: /note="DNA/RNA"
  source: /note="5' tri-ethylene glycol (TEG)"
  modified_base (1)..(1): bicyclic nucleic acid (BNA)
  modified_base (2)..(2): bicyclic nucleic acid (BNA)
  modified_base (8)..(8): 5-methyl modified nucleotide
  modified_base (12)..(12): 5-methyl modified nucleotide
  modified_base (13)..(13): 5-methyl modified nucleotide
  modified_base (17)..(17): 5-methyl modified nucleotide
  source: /note="3' tri-ethylene glycol (TEG)"
gtaaguucuguccaagc

SEQ ID NO: 18717 - DNA, 16 bp, Artificial Sequence
  source: /note="Description of Artificial Sequence: Synthetic oligonucleotide"
  source: /note="Description of Combined DNA/RNA Molecule: Synthetic oligonucleotide"
  source: /note="DNA/RNA"
  source: /note="5' tri-ethylene glycol (TEG)"
  modified_base (1)..(1): bicyclic nucleic acid (BNA)
  modified_base (2)..(2): bicyclic nucleic acid (BNA)
  modified_base (8)..(8): 5-methyl modified nucleotide
  modified_base (12)..(12): 5-methyl modified nucleotide
  modified_base (13)..(13): 5-methyl modified nucleotide
  source: /note="3' tri-ethylene glycol (TEG)"
gtaaguucuguccaag

SEQ ID NO: 18718 - DNA, 15 bp, Artificial Sequence
  source: /note="Description of Artificial Sequence: Synthetic oligonucleotide"
  source: /note="Description of Combined DNA/RNA Molecule: Synthetic oligonucleotide"
  source: /note="DNA/RNA"
  source: /note="5' tri-ethylene glycol (TEG)"
  modified_base (1)..(1): bicyclic nucleic acid (BNA)
  modified_base (2)..(2): bicyclic nucleic acid (BNA)
  modified_base (8)..(8): 5-methyl modified nucleotide
  modified_base (12)..(12): 5-methyl modified nucleotide
  modified_base (13)..(13): 5-methyl modified nucleotide
  source: /note="3' tri-ethylene glycol (TEG)"
gtaaguucuguccaa

SEQ ID NO: 18719 - DNA, 14 bp, Artificial Sequence
  source: /note="Description of Artificial Sequence: Synthetic oligonucleotide"
  source: /note="Description of Combined DNA/RNA Molecule: Synthetic oligonucleotide"
  source: /note="DNA/RNA"
  source: /note="5' tri-ethylene glycol (TEG)"
  modified_base (1)..(1): bicyclic nucleic acid (BNA)
  modified_base (2)..(2): bicyclic nucleic acid (BNA)
  modified_base (8)..(8): 5-methyl modified nucleotide
  modified_base (12)..(12): 5-methyl modified nucleotide
  modified_base (13)..(13): 5-methyl modified nucleotide
  source: /note="3' tri-ethylene glycol (TEG)"
gtaaguucugucca

SEQ ID NO: 18720 - DNA, 13 bp, Artificial Sequence
  source: /note="Description of Artificial Sequence: Synthetic oligonucleotide"
  source: /note="Description of Combined DNA/RNA Molecule: Synthetic oligonucleotide"
  source: /note="DNA/RNA"
  source: /note="5' tri-ethylene glycol (TEG)"
  modified_base (1)..(1): bicyclic nucleic acid (BNA)
  modified_base (2)..(2): bicyclic nucleic acid (BNA)
  modified_base (8)..(8): 5-methyl modified nucleotide
  modified_base (12)..(12): 5-methyl modified nucleotide
  modified_base (13)..(13): 5-methyl modified nucleotide
  source: /note="3' tri-ethylene glycol (TEG)"
gtaaguucugucc

SEQ ID NO: 18721 - DNA, 12 bp, Artificial Sequence
  source: /note="Description of Artificial Sequence: Synthetic oligonucleotide"
  source: /note="Description of Combined DNA/RNA Molecule: Synthetic oligonucleotide"
  source: /note="DNA/RNA"
  source: /note="5' tri-ethylene glycol (TEG)"
  modified_base (1)..(1): bicyclic nucleic acid (BNA)
  modified_base (2)..(2): bicyclic nucleic acid (BNA)
  modified_base (8)..(8): 5-methyl modified nucleotide
  modified_base (12)..(12): 5-methyl modified nucleotide
  source: /note="3' tri-ethylene glycol (TEG)"
gtaaguucuguc

SEQ ID NO: 18722 - DNA, 11 bp, Artificial Sequence
  source: /note="Description of Artificial Sequence: Synthetic oligonucleotide"
  source: /note="Description of Combined DNA/RNA Molecule: Synthetic oligonucleotide"
  source: /note="DNA/RNA"
  source: /note="5' tri-ethylene glycol (TEG)"
  modified_base (1)..(1): bicyclic nucleic acid (BNA)
  modified_base (2)..(2): bicyclic nucleic acid (BNA)
  modified_base (8)..(8): 5-methyl modified nucleotide
  source: /note="3' tri-ethylene glycol (TEG)"
gtaaguucugu

SEQ ID NO: 18723 - DNA, 10 bp, Artificial Sequence
  source: /note="Description of Artificial Sequence: Synthetic oligonucleotide"
  source: /note="Description of Combined DNA/RNA Molecule: Synthetic oligonucleotide"
  source: /note="DNA/RNA"
  source: /note="5' tri-ethylene glycol (TEG)"
  modified_base (1)..(1): bicyclic nucleic acid (BNA)
  modified_base (2)..(2): bicyclic nucleic acid (BNA)
  modified_base (8)..(8): 5-methyl modified nucleotide
  source: /note="3' tri-ethylene glycol (TEG)"
gtaaguucug

SEQ ID NO: 18724 - DNA, 9 bp, Artificial Sequence
  source: /note="Description of Artificial Sequence: Synthetic oligonucleotide"
  source: /note="Description of Combined DNA/RNA Molecule: Synthetic oligonucleotide"
  source: /note="DNA/RNA"
  source: /note="5' tri-ethylene glycol (TEG)"
  modified_base (1)..(1): bicyclic nucleic acid (BNA)
  modified_base (2)..(2): bicyclic nucleic acid (BNA)
  modified_base (8)..(8): 5-methyl modified nucleotide
  source: /note="3' tri-ethylene glycol (TEG)"
gtaaguucu

SEQ ID NO: 18725 - DNA, 8 bp, Artificial Sequence
  source: /note="Description of Artificial Sequence: Synthetic oligonucleotide"
  source: /note="Description of Combined DNA/RNA Molecule: Synthetic oligonucleotide"
  source: /note="DNA/RNA"
  source: /note="5' tri-ethylene glycol (TEG)"
  modified_base (1)..(1): bicyclic nucleic acid (BNA)
  modified_base (2)..(2): bicyclic nucleic acid (BNA)
  modified_base (8)..(8): 5-methyl modified nucleotide
  source: /note="3' tri-ethylene glycol (TEG)"
gtaaguuc

SEQ ID NO: 18726 - RNA, 20 nt, Artificial Sequence
  source: /note="Description of Artificial Sequence: Synthetic oligonucleotide"
  source: /note="RNA"
  source: /note="5' tri-ethylene glycol (TEG)"
  modified_base (1)..(1): bicyclic nucleic acid (BNA)
  modified_base (2)..(2): bicyclic nucleic acid (BNA)
  modified_base (9)..(9): 5-methyl modified nucleotide
  modified_base (13)..(13): 5-methyl modified nucleotide
  modified_base (14)..(14): 5-methyl modified nucleotide
  modified_base (18)..(18): 5-methyl modified nucleotide
  modified_base (19)..(19): 5-methyl modified nucleotide
  modified_base (20)..(20): 5-methyl modified nucleotide
  source: /note="3' tri-ethylene glycol (TEG)"
gguaaguucuguccaagccc

SEQ ID NO: 18727 - RNA, 19 nt, Artificial Sequence
  source: /note="Description of Artificial Sequence: Synthetic oligonucleotide"
  source: /note="RNA"
  source: /note="5' tri-ethylene glycol (TEG)"
  modified_base (1)..(1): bicyclic nucleic acid (BNA)
  modified_base (2)..(2): bicyclic nucleic acid (BNA)
  modified_base (9)..(9): 5-methyl modified nucleotide
  modified_base (13)..(13): 5-methyl modified nucleotide
  modified_base (14)..(14): 5-methyl modified nucleotide
  modified_base (18)..(18): 5-methyl modified nucleotide
  modified_base (19)..(19): 5-methyl modified nucleotide
  source: /note="3' tri-ethylene glycol (TEG)"
gguaaguucuguccaagcc

SEQ ID NO: 18728 - RNA, 17 nt, Artificial Sequence
  source: /note="Description of Artificial Sequence: Synthetic oligonucleotide"
  source: /note="RNA"
  source: /note="5' tri-ethylene glycol (TEG)"
  modified_base (1)..(1): bicyclic nucleic acid (BNA)
  modified_base (2)..(2): bicyclic nucleic acid (BNA)
  modified_base (9)..(9): 5-methyl modified nucleotide
  modified_base (13)..(13): 5-methyl modified nucleotide
  modified_base (14)..(14): 5-methyl modified nucleotide
  source: /note="3' tri-ethylene glycol (TEG)"
gguaaguucuguccaag

SEQ ID NO: 18729 - RNA, 16 nt, Artificial Sequence
  source: /note="Description of Artificial Sequence: Synthetic oligonucleotide"
  source: /note="RNA"
  source: /note="5' tri-ethylene glycol (TEG)"
  modified_base (1)..(1): bicyclic nucleic acid (BNA)
  modified_base (2)..(2): bicyclic nucleic acid (BNA)
  modified_base (9)..(9): 5-methyl modified nucleotide
  modified_base (13)..(13): 5-methyl modified nucleotide
  modified_base (14)..(14): 5-methyl modified nucleotide
  source: /note="3' tri-ethylene glycol (TEG)"
gguaaguucuguccaa

SEQ ID NO: 18730 - RNA, 15 nt, Artificial Sequence
  source: /note="Description of Artificial Sequence: Synthetic oligonucleotide"
  source: /note="RNA"
  source: /note="5' tri-ethylene glycol (TEG)"
  modified_base (1)..(1): bicyclic nucleic acid (BNA)
  modified_base (2)..(2): bicyclic nucleic acid (BNA)
  modified_base (9)..(9): 5-methyl modified nucleotide
  modified_base (13)..(13): 5-methyl modified nucleotide
  modified_base (14)..(14): 5-methyl modified nucleotide
  source: /note="3' tri-ethylene glycol (TEG)"
gguaaguucugucca

SEQ ID NO: 18731 - RNA, 14 nt, Artificial Sequence
  source: /note="Description of Artificial Sequence: Synthetic oligonucleotide"
  source: /note="RNA"
  source: /note="5' tri-ethylene glycol (TEG)"
  modified_base (1)..(1): bicyclic nucleic acid (BNA)
  modified_base (2)..(2): bicyclic nucleic acid (BNA)
  modified_base (9)..(9): 5-methyl modified nucleotide
  modified_base (13)..(13): 5-methyl modified nucleotide
  modified_base (14)..(14): 5-methyl modified nucleotide
  source: /note="3' tri-ethylene glycol (TEG)"
gguaaguucugucc

SEQ ID NO: 18732 - RNA, 13 nt, Artificial Sequence
  source: /note="Description of Artificial Sequence: Synthetic oligonucleotide"
  source: /note="RNA"
  source: /note="5' tri-ethylene glycol (TEG)"
  modified_base (1)..(1): bicyclic nucleic acid (BNA)
  modified_base (2)..(2): bicyclic nucleic acid (BNA)
  modified_base (9)..(9): 5-methyl modified nucleotide
  modified_base (13)..(13): 5-methyl modified nucleotide
  source: /note="3' tri-ethylene glycol (TEG)"
gguaaguucuguc

SEQ ID NO: 18733 - RNA, 12 nt, Artificial Sequence
  source: /note="Description of Artificial Sequence: Synthetic oligonucleotide"
  source: /note="RNA"
  source: /note="5' tri-ethylene glycol (TEG)"
  modified_base (1)..(1): bicyclic nucleic acid (BNA)
  modified_base (2)..(2): bicyclic nucleic acid (BNA)
  modified_base (9)..(9): 5-methyl modified nucleotide
  source: /note="3' tri-ethylene glycol (TEG)"
gguaaguucugu

SEQ ID NO: 18734 - RNA, 11 nt, Artificial Sequence
  source: /note="Description of Artificial Sequence: Synthetic oligonucleotide"
  source: /note="RNA"
  source: /note="5' tri-ethylene glycol (TEG)"
  modified_base (1)..(1): bicyclic nucleic acid (BNA)
  modified_base (2)..(2): bicyclic nucleic acid (BNA)
  modified_base (9)..(9): 5-methyl modified nucleotide
  source: /note="3' tri-ethylene glycol (TEG)"
gguaaguucug

SEQ ID NO: 18735 - RNA, 10 nt, Artificial Sequence
  source: /note="Description of Artificial Sequence: Synthetic oligonucleotide"
  source: /note="RNA"
  source: /note="5' tri-ethylene glycol (TEG)"
  modified_base (1)..(1): bicyclic nucleic acid (BNA)
  modified_base (2)..(2): bicyclic nucleic acid (BNA)
  modified_base (9)..(9): 5-methyl modified nucleotide
  source: /note="3' tri-ethylene glycol (TEG)"
gguaaguucu

SEQ ID NO: 18736 - RNA, 9 nt, Artificial Sequence
  source: /note="Description of Artificial Sequence: Synthetic oligonucleotide"
  source: /note="RNA"
  source: /note="5' tri-ethylene glycol (TEG)"
  modified_base (1)..(1): bicyclic nucleic acid (BNA)
  modified_base (2)..(2): bicyclic nucleic acid (BNA)
  modified_base (9)..(9): 5-methyl modified nucleotide
  source: /note="3' tri-ethylene glycol (TEG)"
gguaaguuc

SEQ ID NO: 18737 - RNA, 8 nt, Artificial Sequence
  source: /note="Description of Artificial Sequence: Synthetic oligonucleotide"
  source: /note="RNA"
  source: /note="5' tri-ethylene glycol (TEG)"
  modified_base (1)..(1): bicyclic nucleic acid (BNA)
  modified_base (2)..(2): bicyclic nucleic acid (BNA)
  source: /note="3' tri-ethylene glycol (TEG)"
gguaaguu

SEQ ID NO: 18738 - RNA, 20 nt, Artificial Sequence
  source: /note="Description of Artificial Sequence: Synthetic oligonucleotide"
  source: /note="RNA"
  source: /note="5' tri-ethylene glycol (TEG)"
  modified_base (1)..(1): 5-methyl bicyclic nucleic acid
  modified_base (2)..(2): bicyclic nucleic acid (BNA)
  modified_base (10)..(10): 5-methyl modified nucleotide
  modified_base (14)..(14): 5-methyl modified nucleotide
  modified_base (15)..(15): 5-methyl modified nucleotide
  modified_base (19)..(19): 5-methyl modified nucleotide
  modified_base (20)..(20): 5-methyl modified nucleotide
  source: /note="3' tri-ethylene glycol (TEG)"
cgguaaguucuguccaagcc

SEQ ID NO: 18739 - RNA, 19 nt, Artificial Sequence
  source: /note="Description of Artificial Sequence: Synthetic oligonucleotide"
  source: /note="RNA"
  source: /note="5' tri-ethylene glycol (TEG)"
  modified_base (1)..(1): 5-methyl bicyclic nucleic acid
  modified_base (2)..(2): bicyclic nucleic acid (BNA)
  modified_base (10)..(10): 5-methyl modified nucleotide
  modified_base (14)..(14): 5-methyl modified nucleotide
  modified_base (15)..(15): 5-methyl modified nucleotide
  modified_base (19)..(19): 5-methyl modified nucleotide
  source: /note="3' tri-ethylene glycol (TEG)"
cgguaaguucuguccaagc

SEQ ID NO: 18740 - RNA, 18 nt, Artificial Sequence
  source: /note="Description of Artificial Sequence: Synthetic oligonucleotide"
  source: /note="RNA"
  source: /note="5' tri-ethylene glycol (TEG)"
  modified_base (1)..(1): 5-methyl bicyclic nucleic acid
  modified_base (2)..(2): bicyclic nucleic acid (BNA)
  modified_base (10)..(10): 5-methyl modified nucleotide
  modified_base (14)..(14): 5-methyl modified nucleotide
  modified_base (15)..(15): 5-methyl modified nucleotide
  source: /note="3' tri-ethylene glycol (TEG)"
cgguaaguucuguccaag

SEQ ID NO: 18741 - RNA, 17 nt, Artificial Sequence
  source: /note="Description of Artificial Sequence: Synthetic oligonucleotide"
  source: /note="RNA"
  source: /note="5' tri-ethylene glycol (TEG)"
  modified_base (1)..(1): 5-methyl bicyclic nucleic acid
  modified_base (2)..(2): bicyclic nucleic acid (BNA)
  modified_base (10)..(10): 5-methyl modified nucleotide
  modified_base (14)..(14): 5-methyl modified nucleotide
  modified_base (15)..(15): 5-methyl modified nucleotide
  source: /note="3' tri-ethylene glycol (TEG)"
cgguaaguucuguccaa

SEQ ID NO: 18742 - RNA, 16 nt, Artificial Sequence
  source: /note="Description of Artificial Sequence: Synthetic oligonucleotide"
  source: /note="RNA"
  source: /note="5' tri-ethylene glycol (TEG)"
  modified_base (1)..(1): 5-methyl bicyclic nucleic acid
  modified_base (2)..(2): bicyclic nucleic acid (BNA)
  modified_base (10)..(10): 5-methyl modified nucleotide
  modified_base (14)..(14): 5-methyl modified nucleotide
  modified_base (15)..(15): 5-methyl modified nucleotide
  source: /note="3' tri-ethylene glycol (TEG)"
cgguaaguucugucca

SEQ ID NO: 18743 - RNA, 15 nt, Artificial Sequence
  source: /note="Description of Artificial Sequence: Synthetic oligonucleotide"
  source: /note="RNA"
  source: /note="5' tri-ethylene glycol (TEG)"
  modified_base (1)..(1): 5-methyl bicyclic nucleic acid
  modified_base (2)..(2): bicyclic nucleic acid (BNA)
  modified_base (10)..(10): 5-methyl modified nucleotide
  modified_base (14)..(14): 5-methyl modified nucleotide
  modified_base (15)..(15): 5-methyl modified nucleotide
  source: /note="3' tri-ethylene glycol (TEG)"
cgguaaguucugucc

SEQ ID NO: 18744 - RNA, 14 nt, Artificial Sequence
  source: /note="Description of Artificial Sequence: Synthetic oligonucleotide"
  source: /note="RNA"
  source: /note="5' tri-ethylene glycol (TEG)"
  modified_base (1)..(1): 5-methyl bicyclic nucleic acid
  modified_base (2)..(2): bicyclic nucleic acid (BNA)
  modified_base (10)..(10): 5-methyl modified nucleotide
  modified_base (14)..(14): 5-methyl modified nucleotide
  source: /note="3' tri-ethylene glycol (TEG)"
cgguaaguucuguc

SEQ ID NO: 18745 - RNA, 13 nt, Artificial Sequence
  source: /note="Description of Artificial Sequence: Synthetic oligonucleotide"
  source: /note="RNA"
  source: /note="5' tri-ethylene glycol (TEG)"
  modified_base (1)..(1): 5-methyl bicyclic nucleic acid
  modified_base (2)..(2): bicyclic nucleic acid (BNA)
  modified_base (10)..(10): 5-methyl modified nucleotide
  source: /note="3' tri-ethylene glycol (TEG)"
cgguaaguucugu

SEQ ID NO: 18746 - RNA, 12 nt, Artificial Sequence
  source: /note="Description of Artificial Sequence: Synthetic oligonucleotide"
  source: /note="RNA"
  source: /note="5' tri-ethylene glycol (TEG)"
  modified_base (1)..(1): 5-methyl bicyclic nucleic acid
  modified_base (2)..(2): bicyclic nucleic acid (BNA)
  modified_base (10)..(10): 5-methyl modified nucleotide
  source: /note="3' tri-ethylene glycol (TEG)"
cgguaaguucug

SEQ ID NO: 18747 - RNA, 11 nt, Artificial Sequence
  source: /note="Description of Artificial Sequence: Synthetic oligonucleotide"
  source: /note="RNA"
  source: /note="5' tri-ethylene glycol (TEG)"
  modified_base (1)..(1): 5-methyl bicyclic nucleic acid
  modified_base (2)..(2): bicyclic nucleic acid (BNA)
  modified_base (10)..(10): 5-methyl modified nucleotide
  source: /note="3' tri-ethylene glycol (TEG)"
cgguaaguucu

SEQ ID NO: 18748 - RNA, 10 nt, Artificial Sequence
  source: /note="Description of Artificial Sequence: Synthetic oligonucleotide"
  source: /note="RNA"
  source: /note="5' tri-ethylene glycol (TEG)"
  modified_base (1)..(1): 5-methyl bicyclic nucleic acid
  modified_base (2)..(2): bicyclic nucleic acid (BNA)
  modified_base (10)..(10): 5-methyl modified nucleotide
  source: /note="3' tri-ethylene glycol (TEG)"
cgguaaguuc

SEQ ID NO: 18749 - RNA, 9 nt, Artificial Sequence
  source: /note="Description of Artificial Sequence: Synthetic oligonucleotide"
  source: /note="RNA"
  source: /note="5' tri-ethylene glycol (TEG)"
  modified_base (1)..(1): 5-methyl bicyclic nucleic acid
  modified_base (2)..(2): bicyclic nucleic acid (BNA)
  source: /note="3' tri-ethylene glycol (TEG)"
cgguaaguu

SEQ ID NO: 18750 - RNA, 8 nt, Artificial Sequence
  source: /note="Description of Artificial Sequence: Synthetic oligonucleotide"
  source: /note="RNA"
  source: /note="5' tri-ethylene glycol (TEG)"
  modified_base (1)..(1): 5-methyl bicyclic nucleic acid
  modified_base (2)..(2): bicyclic nucleic acid (BNA)
  source: /note="3' tri-ethylene glycol (TEG)"
cgguaagu

SEQ ID NO: 18751 - DNA, 20 bp, Artificial Sequence
  source: /note="Description of Artificial Sequence: Synthetic oligonucleotide"
  source: /note="Description of Combined DNA/RNA Molecule: Synthetic oligonucleotide"
  source: /note="DNA/RNA"
  source: /note="5' tri-ethylene glycol (TEG)"
  modified_base (1)..(1): bicyclic nucleic acid (BNA)
  modified_base (2)..(2): 5-methyl bicyclic nucleic acid
  modified_base (11)..(11): 5-methyl modified nucleotide
  modified_base (15)..(15): 5-methyl modified nucleotide
  modified_base (16)..(16): 5-methyl modified nucleotide
  modified_base (20)..(20): 5-methyl modified nucleotide
  source: /note="3' tri-ethylene glycol (TEG)"
tcgguaaguucuguccaagc

SEQ ID NO: 18752 - DNA, 19 bp, Artificial Sequence
  source: /note="Description of Artificial Sequence: Synthetic oligonucleotide"
  source: /note="Description of Combined DNA/RNA Molecule: Synthetic oligonucleotide"
  source: /note="DNA/RNA"
  source: /note="5' tri-ethylene glycol (TEG)"
  modified_base (1)..(1): bicyclic nucleic acid (BNA)
  modified_base (2)..(2): 5-methyl bicyclic nucleic acid
  modified_base (11)..(11): 5-methyl modified nucleotide
  modified_base (15)..(15): 5-methyl modified nucleotide
  modified_base (16)..(16): 5-methyl modified nucleotide
  source: /note="3' tri-ethylene glycol (TEG)"
tcgguaaguucuguccaag

SEQ ID NO: 18753 - DNA, 18 bp, Artificial Sequence
  source: /note="Description of Artificial Sequence: Synthetic oligonucleotide"
  source: /note="Description of Combined DNA/RNA Molecule: Synthetic oligonucleotide"
  source: /note="DNA/RNA"
  source: /note="5' tri-ethylene glycol (TEG)"
  modified_base (1)..(1): bicyclic nucleic acid (BNA)
  modified_base (2)..(2): 5-methyl bicyclic nucleic acid
  modified_base (11)..(11): 5-methyl modified nucleotide
  modified_base (15)..(15): 5-methyl modified nucleotide
  modified_base (16)..(16): 5-methyl modified nucleotide
  source: /note="3' tri-ethylene glycol (TEG)"
tcgguaaguucuguccaa

SEQ ID NO: 18754 - DNA, 17 bp, Artificial Sequence
  source: /note="Description of Artificial Sequence: Synthetic oligonucleotide"
  source: /note="Description of Combined DNA/RNA Molecule: Synthetic oligonucleotide"
  source: /note="DNA/RNA"
  source: /note="5' tri-ethylene glycol (TEG)"
  modified_base (1)..(1): bicyclic nucleic acid (BNA)
  modified_base (2)..(2): 5-methyl bicyclic nucleic acid
  modified_base (11)..(11): 5-methyl modified nucleotide
  modified_base (15)..(15): 5-methyl modified nucleotide
  modified_base (16)..(16): 5-methyl modified nucleotide
  source: /note="3' tri-ethylene glycol (TEG)"
tcgguaaguucugucca

SEQ ID NO: 18755 - DNA, 16 bp, Artificial Sequence
  source: /note="Description of Artificial Sequence: Synthetic oligonucleotide"
  source: /note="Description of Combined DNA/RNA Molecule: Synthetic oligonucleotide"
  source: /note="DNA/RNA"
  source: /note="5' tri-ethylene glycol (TEG)"
  modified_base (1)..(1): bicyclic nucleic acid (BNA)
  modified_base (2)..(2): 5-methyl bicyclic nucleic acid
  modified_base (11)..(11): 5-methyl modified nucleotide
  modified_base (15)..(15): 5-methyl modified nucleotide
  modified_base (16)..(16): 5-methyl modified nucleotide
  source: /note="3' tri-ethylene glycol (TEG)"
tcgguaaguucugucc

SEQ ID NO: 18756 - DNA, 15 bp, Artificial Sequence
  source: /note="Description of Artificial Sequence: Synthetic oligonucleotide"
  source: /note="Description of Combined DNA/RNA Molecule: Synthetic oligonucleotide"
  source: /note="DNA/RNA"
  source: /note="5' tri-ethylene glycol (TEG)"
  modified_base (1)..(1): bicyclic nucleic acid (BNA)
  modified_base (2)..(2): 5-methyl bicyclic nucleic acid
  modified_base (11)..(11): 5-methyl modified nucleotide
  modified_base (15)..(15): 5-methyl modified nucleotide
  source: /note="3' tri-ethylene glycol (TEG)"
tcgguaaguucuguc

SEQ ID NO: 18757 - DNA, 14 bp, Artificial Sequence
  source: /note="Description of Artificial Sequence: Synthetic oligonucleotide"
  source: /note="Description of Combined DNA/RNA Molecule: Synthetic oligonucleotide"
  source: /note="DNA/RNA"
  source: /note="5' tri-ethylene glycol (TEG)"
  modified_base (1)..(1): bicyclic nucleic acid (BNA)
  modified_base (2)..(2): 5-methyl bicyclic nucleic acid
  modified_base (11)..(11): 5-methyl modified nucleotide
  source: /note="3' tri-ethylene glycol (TEG)"
tcgguaaguucugu

SEQ ID NO: 18758 - DNA, 13 bp, Artificial Sequence
  source: /note="Description of Artificial Sequence: Synthetic oligonucleotide"
  source: /note="Description of Combined DNA/RNA Molecule: Synthetic oligonucleotide"
  source: /note="DNA/RNA"
  source: /note="5' tri-ethylene glycol (TEG)"
  modified_base (1)..(1): bicyclic nucleic acid (BNA)
  modified_base (2)..(2): 5-methyl bicyclic nucleic acid
  modified_base (11)..(11): 5-methyl modified nucleotide
  source: /note="3' tri-ethylene glycol (TEG)"
tcgguaaguucug

SEQ ID NO: 18759 - DNA, 12 bp, Artificial Sequence
  source: /note="Description of Artificial Sequence: Synthetic oligonucleotide"
  source: /note="Description of Combined DNA/RNA Molecule: Synthetic oligonucleotide"
  source: /note="DNA/RNA"
  source: /note="5' tri-ethylene glycol (TEG)"
  modified_base (1)..(1): bicyclic nucleic acid (BNA)
  modified_base (2)..(2): 5-methyl bicyclic nucleic acid
  modified_base (11)..(11): 5-methyl modified nucleotide
  source: /note="3' tri-ethylene glycol (TEG)"
tcgguaaguucu

SEQ ID NO: 18760 - DNA, 11 bp, Artificial Sequence
  source: /note="Description of Artificial Sequence: Synthetic oligonucleotide"
  source: /note="Description of Combined DNA/RNA Molecule: Synthetic oligonucleotide"
  source: /note="DNA/RNA"
  source: /note="5' tri-ethylene glycol (TEG)"
  modified_base (1)..(1): bicyclic nucleic acid (BNA)
  modified_base (2)..(2): 5-methyl bicyclic nucleic acid
  modified_base (11)..(11): 5-methyl modified nucleotide
  source: /note="3' tri-ethylene glycol (TEG)"
tcgguaaguuc

SEQ ID NO: 18761 - DNA, 10 bp, Artificial Sequence
  source: /note="Description of Artificial Sequence: Synthetic oligonucleotide"
  source: /note="Description of Combined DNA/RNA Molecule: Synthetic oligonucleotide"
  source: /note="DNA/RNA"
  source: /note="5' tri-ethylene glycol (TEG)"
  modified_base (1)..(1): bicyclic nucleic acid (BNA)
  modified_base (2)..(2): 5-methyl bicyclic nucleic acid
  source: /note="3' tri-ethylene glycol (TEG)"
tcgguaaguu

SEQ ID NO: 18762 - DNA, 9 bp, Artificial Sequence
  source: /note="Description of Artificial Sequence: Synthetic oligonucleotide"
  source: /note="Description of Combined DNA/RNA Molecule: Synthetic oligonucleotide"
  source: /note="DNA/RNA"
  source: /note="5' tri-ethylene glycol (TEG)"
  modified_base (1)..(1): bicyclic nucleic acid (BNA)
  modified_base (2)..(2): 5-methyl bicyclic nucleic acid
  source: /note="3' tri-ethylene glycol (TEG)"
tcgguaagu

SEQ ID NO: 18763 - DNA, 20 bp, Artificial Sequence
  source: /note="Description of Artificial Sequence: Synthetic oligonucleotide"
  source: /note="Description of Combined DNA/RNA Molecule: Synthetic oligonucleotide"
  source: /note="DNA/RNA"
  source: /note="5' tri-ethylene glycol (TEG)"
  modified_base (1)..(1): bicyclic nucleic acid (BNA)
  modified_base (2)..(2): bicyclic nucleic acid (BNA)
  modified_base (3)..(3): 5-methyl modified nucleotide
  modified_base (12)..(12): 5-methyl modified nucleotide
  modified_base (16)..(16): 5-methyl modified nucleotide
  modified_base (17)..(17): 5-methyl modified nucleotide
  source: /note="3' tri-ethylene glycol (TEG)"
gtcgguaaguucuguccaag

SEQ ID NO: 18764 - DNA, 19 bp, Artificial Sequence
  source: /note="Description of Artificial Sequence: Synthetic oligonucleotide"
  source: /note="Description of Combined DNA/RNA Molecule: Synthetic oligonucleotide"
  source: /note="DNA/RNA"
  source: /note="5' tri-ethylene glycol (TEG)"
  modified_base (1)..(1): bicyclic nucleic acid (BNA)
  modified_base (2)..(2): bicyclic nucleic acid (BNA)
  modified_base (3)..(3): 5-methyl modified nucleotide
  modified_base (12)..(12): 5-methyl modified nucleotide
  modified_base (16)..(16): 5-methyl modified nucleotide
  modified_base (17)..(17): 5-methyl modified nucleotide
  source: /note="3' tri-ethylene glycol (TEG)"
gtcgguaaguucuguccaa

SEQ ID NO: 18765 - DNA, 18 bp, Artificial Sequence
  source: /note="Description of Artificial Sequence: Synthetic oligonucleotide"
  source: /note="Description of Combined DNA/RNA Molecule: Synthetic oligonucleotide"
  source: /note="DNA/RNA"
  source: /note="5' tri-ethylene glycol (TEG)"
  modified_base (1)..(1): bicyclic nucleic acid (BNA)
  modified_base (2)..(2): bicyclic nucleic acid (BNA)
  modified_base (3)..(3): 5-methyl modified nucleotide
  modified_base (12)..(12): 5-methyl modified nucleotide
  modified_base (16)..(16): 5-methyl modified nucleotide
  modified_base (17)..(17): 5-methyl modified nucleotide
  source: /note="3' tri-ethylene glycol (TEG)"
gtcgguaaguucugucca

SEQ ID NO: 18766 - DNA, 17 bp, Artificial Sequence
  source: /note="Description of Artificial Sequence: Synthetic oligonucleotide"
  source: /note="Description of Combined DNA/RNA Molecule: Synthetic oligonucleotide"
  source: /note="DNA/RNA"
  source: /note="5' tri-ethylene glycol (TEG)"
  modified_base (1)..(1): bicyclic nucleic acid (BNA)
  modified_base (2)..(2): bicyclic nucleic acid (BNA)
  modified_base (3)..(3): 5-methyl modified nucleotide
  modified_base (12)..(12): 5-methyl modified nucleotide
  modified_base (16)..(16): 5-methyl modified nucleotide
  modified_base (17)..(17): 5-methyl modified nucleotide
  source: /note="3' tri-ethylene glycol (TEG)"
gtcgguaaguucugucc

SEQ ID NO: 18767 - DNA, 16 bp, Artificial Sequence
  source: /note="Description of Artificial Sequence: Synthetic oligonucleotide"
  source: /note="Description of Combined DNA/RNA Molecule: Synthetic oligonucleotide"
  source: /note="DNA/RNA"
  source: /note="5' tri-ethylene glycol (TEG)"
  modified_base (1)..(1): bicyclic nucleic acid (BNA)
  modified_base (2)..(2): bicyclic nucleic acid (BNA)
  modified_base (3)..(3): 5-methyl modified nucleotide
  modified_base (12)..(12): 5-methyl modified nucleotide
  modified_base (16)..(16): 5-methyl modified nucleotide
  source: /note="3' tri-ethylene glycol (TEG)"
gtcgguaaguucuguc

SEQ ID NO: 18768 - DNA, 15 bp, Artificial Sequence
  source: /note="Description of Artificial Sequence: Synthetic oligonucleotide"
  source: /note="Description of Combined DNA/RNA Molecule: Synthetic oligonucleotide"
  source: /note="DNA/RNA"
  source: /note="5' tri-ethylene glycol (TEG)"
  modified_base (1)..(1): bicyclic nucleic acid (BNA)
  modified_base (2)..(2): bicyclic nucleic acid (BNA)
  modified_base (3)..(3): 5-methyl modified nucleotide
  modified_base (12)..(12): 5-methyl modified nucleotide
  source: /note="3' tri-ethylene glycol (TEG)"
gtcgguaaguucugu

SEQ ID NO: 18769 - DNA, 14 bp, Artificial Sequence
  source: /note="Description of Artificial Sequence: Synthetic oligonucleotide"
  source: /note="Description of Combined DNA/RNA Molecule: Synthetic oligonucleotide"
  source: /note="DNA/RNA"
  source: /note="5' tri-ethylene glycol (TEG)"
  modified_base (1)..(1): bicyclic nucleic acid (BNA)
  modified_base (2)..(2): bicyclic nucleic acid (BNA)
  modified_base (3)..(3): 5-methyl modified nucleotide
  modified_base (12)..(12): 5-methyl modified nucleotide
  source: /note="3' tri-ethylene glycol (TEG)"
gtcgguaaguucug

SEQ ID NO: 18770 - DNA, 13 bp, Artificial Sequence
  source: /note="Description of Artificial Sequence: Synthetic oligonucleotide"
  source: /note="Description of Combined DNA/RNA Molecule: Synthetic oligonucleotide"
  source: /note="DNA/RNA"
  source: /note="5' tri-ethylene glycol (TEG)"
  modified_base (1)..(1): bicyclic nucleic acid (BNA)
  modified_base (2)..(2): bicyclic nucleic acid (BNA)
  modified_base (3)..(3): 5-methyl modified nucleotide
  modified_base (12)..(12): 5-methyl modified nucleotide
  source: /note="3' tri-ethylene glycol (TEG)"
gtcgguaaguucu

SEQ ID NO: 18771 - DNA, 12 bp, Artificial Sequence
  source: /note="Description of Artificial Sequence: Synthetic oligonucleotide"
  source: /note="Description of Combined DNA/RNA Molecule: Synthetic oligonucleotide"
  source: /note="DNA/RNA"
  source: /note="5' tri-ethylene glycol (TEG)"
  modified_base (1)..(1): bicyclic nucleic acid (BNA)
  modified_base (2)..(2): bicyclic nucleic acid (BNA)
  modified_base (3)..(3): 5-methyl modified nucleotide
  modified_base (12)..(12): 5-methyl modified nucleotide
  source: /note="3' tri-ethylene glycol (TEG)"
gtcgguaaguuc

SEQ ID NO: 18772 - DNA, 11 bp, Artificial Sequence
  source: /note="Description of Artificial Sequence: Synthetic oligonucleotide"
  source: /note="Description of Combined DNA/RNA Molecule: Synthetic oligonucleotide"
  source: /note="DNA/RNA"
  source: /note="5' tri-ethylene glycol (TEG)"
  modified_base (1)..(1): bicyclic nucleic acid (BNA)
  modified_base (2)..(2): bicyclic nucleic acid (BNA)
  modified_base (3)..(3): 5-methyl modified nucleotide
  source: /note="3' tri-ethylene glycol (TEG)"
gtcgguaaguu

SEQ ID NO: 18773 - DNA, 10 bp, Artificial Sequence
  source: /note="Description of Artificial Sequence: Synthetic oligonucleotide"
  source: /note="Description of Combined DNA/RNA Molecule: Synthetic oligonucleotide"
  source: /note="DNA/RNA"
  source: /note="5' tri-ethylene glycol (TEG)"
  modified_base (1)..(1): bicyclic nucleic acid (BNA)
  modified_base (2)..(2): bicyclic nucleic acid (BNA)
  modified_base (3)..(3): 5-methyl modified nucleotide
  source: /note="3' tri-ethylene glycol (TEG)"
gtcgguaagu

SEQ ID NO: 18774 - RNA, 20 nt, Artificial Sequence
  source: /note="Description of Artificial Sequence: Synthetic oligonucleotide"
  source: /note="RNA"
  source: /note="5' tri-ethylene glycol (TEG)"
  modified_base (1)..(1): bicyclic nucleic acid (BNA)
  modified_base (2)..(2): bicyclic nucleic acid (BNA)
  modified_base (4)..(4): 5-methyl modified nucleotide
  modified_base (13)..(13): 5-methyl modified nucleotide
  modified_base (17)..(17): 5-methyl modified nucleotide
  modified_base (18)..(18): 5-methyl modified nucleotide
  source: /note="3' tri-ethylene glycol (TEG)"
agucgguaaguucuguccaa

SEQ ID NO: 18775 - RNA, 19 nt, Artificial Sequence
  source: /note="Description of Artificial Sequence: Synthetic oligonucleotide"
  source: /note="RNA"
  source: /note="5' tri-ethylene glycol (TEG)"
  modified_base (1)..(1): bicyclic nucleic acid (BNA)
  modified_base (2)..(2): bicyclic nucleic acid (BNA)
  modified_base (4)..(4): 5-methyl modified nucleotide
  modified_base (13)..(13): 5-methyl modified nucleotide
  modified_base (17)..(17): 5-methyl modified nucleotide
  modified_base (18)..(18): 5-methyl modified nucleotide
  source: /note="3' tri-ethylene glycol (TEG)"
agucgguaaguucugucca

SEQ ID NO: 18776 - RNA, 17 nt, Artificial Sequence
  source: /note="Description of Artificial Sequence: Synthetic oligonucleotide"
  source: /note="RNA"
  source: /note="5' tri-ethylene glycol (TEG)"
  modified_base (1)..(1): bicyclic nucleic acid (BNA)
  modified_base (2)..(2): bicyclic nucleic acid (BNA)
  modified_base (4)..(4): 5-methyl modified nucleotide
  modified_base (13)..(13): 5-methyl modified nucleotide
  modified_base (17)..(17): 5-methyl modified nucleotide
  source: /note="3' tri-ethylene glycol (TEG)"
agucgguaaguucuguc

SEQ ID NO: 18777 - RNA, 16 nt, Artificial Sequence
  source: /note="Description of Artificial Sequence: Synthetic oligonucleotide"
  source: /note="RNA"
  source: /note="5' tri-ethylene glycol (TEG)"
  modified_base (1)..(1): bicyclic nucleic acid (BNA)
  modified_base (2)..(2): bicyclic nucleic acid (BNA)
  modified_base (4)..(4): 5-methyl modified nucleotide
  modified_base (13)..(13): 5-methyl modified nucleotide
  source: /note="3' tri-ethylene glycol (TEG)"
agucgguaaguucugu

SEQ ID NO: 18778 - RNA, 15 nt, Artificial Sequence
  source: /note="Description of Artificial Sequence: Synthetic oligonucleotide"
  source: /note="RNA"
  source: /note="5' tri-ethylene glycol (TEG)"
  modified_base (1)..(1): bicyclic nucleic acid (BNA)
  modified_base (2)..(2): bicyclic nucleic acid (BNA)
  modified_base (4)..(4): 5-methyl modified nucleotide
  modified_base (13)..(13): 5-methyl modified nucleotide
  source: /note="3' tri-ethylene glycol (TEG)"
agucgguaaguucug

SEQ ID NO: 18779 - RNA, 14 nt, Artificial Sequence
  source: /note="Description of Artificial Sequence: Synthetic oligonucleotide"
  source: /note="RNA"
  source: /note="5' tri-ethylene glycol (TEG)"
  modified_base (1)..(1): bicyclic nucleic acid (BNA)
  modified_base (2)..(2): bicyclic nucleic acid (BNA)
  modified_base (4)..(4): 5-methyl modified nucleotide
  modified_base (13)..(13): 5-methyl modified nucleotide
  source: /note="3' tri-ethylene glycol (TEG)"
agucgguaaguucu

SEQ ID NO: 18780 - RNA, 13 nt, Artificial Sequence
  source: /note="Description of Artificial Sequence: Synthetic oligonucleotide"
  source: /note="RNA"
  source: /note="5' tri-ethylene glycol (TEG)"
  modified_base (1)..(1): bicyclic nucleic acid (BNA)
  modified_base (2)..(2): bicyclic nucleic acid (BNA)
  modified_base (4)..(4): 5-methyl modified nucleotide
  modified_base (13)..(13): 5-methyl modified nucleotide
  source: /note="3' tri-ethylene glycol (TEG)"
agucgguaaguuc

SEQ ID NO: 18781 - RNA, 12 nt, Artificial Sequence
  source: /note="Description of Artificial Sequence: Synthetic oligonucleotide"
  source: /note="RNA"
  source: /note="5' tri-ethylene glycol (TEG)"
  modified_base (1)..(1): bicyclic nucleic acid (BNA)
  modified_base (2)..(2): bicyclic nucleic acid (BNA)
  modified_base (4)..(4): 5-methyl modified nucleotide
  source: /note="3' tri-ethylene glycol (TEG)"
agucgguaaguu

SEQ ID NO: 18782 - RNA, 11 nt, Artificial Sequence
  source: /note="Description of Artificial Sequence: Synthetic oligonucleotide"
  source: /note="RNA"
  source: /note="5' tri-ethylene glycol (TEG)"
  modified_base (1)..(1): bicyclic nucleic acid (BNA)
  modified_base (2)..(2): bicyclic nucleic acid (BNA)
  modified_base (4)..(4): 5-methyl modified nucleotide
  source: /note="3' tri-ethylene glycol (TEG)"
agucgguaagu

SEQ ID NO: 18783 - RNA, 20 nt, Artificial Sequence
  source: /note="Description of Artificial Sequence: Synthetic oligonucleotide"
  source: /note="RNA"
  source: /note="5' tri-ethylene glycol (TEG)"
  modified_base (1)..(1): 5-methyl bicyclic nucleic acid
  modified_base (2)..(2): bicyclic nucleic acid (BNA)
  modified_base (5)..(5): 5-methyl modified nucleotide
  modified_base (14)..(14): 5-methyl modified nucleotide
  modified_base (18)..(18): 5-methyl modified nucleotide
  modified_base (19)..(19): 5-methyl modified nucleotide
  source: /note="3' tri-ethylene glycol (TEG)"
cagucgguaaguucugucca

SEQ ID NO: 18784 - RNA, 19 nt, Artificial Sequence
  source: /note="Description of Artificial Sequence: Synthetic oligonucleotide"
  source: /note="RNA"
  source: /note="5' tri-ethylene glycol (TEG)"
  modified_base (1)..(1): 5-methyl bicyclic nucleic acid
  modified_base (2)..(2): bicyclic nucleic acid (BNA)
  modified_base (5)..(5): 5-methyl modified nucleotide
  modified_base (14)..(14): 5-methyl modified nucleotide
  modified_base (18)..(18): 5-methyl modified nucleotide
  modified_base (19)..(19): 5-methyl modified nucleotide
  source: /note="3' tri-ethylene glycol (TEG)"
cagucgguaaguucugucc

SEQ ID NO: 18785 - RNA, 18 nt, Artificial Sequence
  source: /note="Description of Artificial Sequence: Synthetic oligonucleotide"
  source: /note="RNA"
  source: /note="5' tri-ethylene glycol (TEG)"
  modified_base (1)..(1): 5-methyl bicyclic nucleic acid
  modified_base (2)..(2): bicyclic nucleic acid (BNA)
  modified_base (5)..(5): 5-methyl modified nucleotide
  modified_base (14)..(14): 5-methyl modified nucleotide
  modified_base (18)..(18): 5-methyl modified nucleotide
  source: /note="3' tri-ethylene glycol (TEG)"
cagucgguaaguucuguc

SEQ ID NO: 18786 - RNA, 17 nt, Artificial Sequence
  source: /note="Description of Artificial Sequence: Synthetic oligonucleotide"
  source: /note="RNA"
  source: /note="5' tri-ethylene glycol (TEG)"
  modified_base (1)..(1): 5-methyl bicyclic nucleic acid
  modified_base (2)..(2): bicyclic nucleic acid (BNA)
  modified_base (5)..(5): 5-methyl modified nucleotide
  modified_base (14)..(14): 5-methyl modified nucleotide
  source: /note="3' tri-ethylene glycol (TEG)"
cagucgguaaguucugu

SEQ ID NO: 18787 - RNA, 16 nt, Artificial Sequence
  source: /note="Description of Artificial Sequence: Synthetic oligonucleotide"
  source: /note="RNA"
  source: /note="5' tri-ethylene glycol (TEG)"
  modified_base (1)..(1): 5-methyl bicyclic nucleic acid
  modified_base (2)..(2): bicyclic nucleic acid (BNA)
  modified_base (5)..(5): 5-methyl modified nucleotide
  modified_base (14)..(14): 5-methyl modified nucleotide
  source: /note="3' tri-ethylene glycol (TEG)"
cagucgguaaguucug

SEQ ID NO: 18788 - RNA, 15 nt, Artificial Sequence
  source: /note="Description of Artificial Sequence: Synthetic oligonucleotide"
  source: /note="RNA"
  source: /note="5' tri-ethylene glycol (TEG)"
  modified_base (1)..(1): 5-methyl bicyclic nucleic acid
  modified_base (2)..(2): bicyclic nucleic acid (BNA)
  modified_base (5)..(5): 5-methyl modified nucleotide
  modified_base (14)..(14): 5-methyl modified nucleotide
  source: /note="3' tri-ethylene glycol (TEG)"
cagucgguaaguucu

SEQ ID NO: 18789 - RNA, 14 nt, Artificial Sequence
  source: /note="Description of Artificial Sequence: Synthetic oligonucleotide"
  source: /note="RNA"
  source: /note="5' tri-ethylene glycol (TEG)"
  modified_base (1)..(1): 5-methyl bicyclic nucleic acid
  modified_base (2)..(2): bicyclic nucleic acid (BNA)
  modified_base (5)..(5): 5-methyl modified nucleotide
  modified_base (14)..(14): 5-methyl modified nucleotide
  source: /note="3' tri-ethylene glycol (TEG)"
cagucgguaaguuc

SEQ ID NO: 18790 - RNA, 13 nt, Artificial Sequence
  source: /note="Description of Artificial Sequence: Synthetic oligonucleotide"
  source: /note="RNA"
  source: /note="5' tri-ethylene glycol (TEG)"
  modified_base (1)..(1): 5-methyl bicyclic nucleic acid
  modified_base (2)..(2): bicyclic nucleic acid (BNA)
  modified_base (5)..(5): 5-methyl modified nucleotide
  source: /note="3' tri-ethylene glycol (TEG)"
cagucgguaaguu

SEQ ID NO: 18791 - RNA, 12 nt, Artificial Sequence
  source: /note="Description of Artificial Sequence: Synthetic oligonucleotide"
  source: /note="RNA"
  source: /note="5' tri-ethylene glycol (TEG)"
  modified_base (1)..(1): 5-methyl bicyclic nucleic acid
  modified_base (2)..(2): bicyclic nucleic acid (BNA)
  modified_base (5)..(5): 5-methyl modified nucleotide
  source: /note="3' tri-ethylene glycol (TEG)"
cagucgguaagu

SEQ ID NO: 18792 - RNA, 20 nt, Artificial Sequence
  source: /note="Description of Artificial Sequence: Synthetic oligonucleotide"
  source: /note="RNA"
  source: /note="5' tri-ethylene glycol (TEG)"
  modified_base (1)..(1): 5-methyl bicyclic nucleic acid
  modified_base (2)..(2): 5-methyl bicyclic nucleic acid
  modified_base (6)..(6): 5-methyl modified nucleotide
  modified_base (15)..(15): 5-methyl modified nucleotide
  modified_base (19)..(19): 5-methyl modified nucleotide
  modified_base (20)..(20): 5-methyl modified nucleotide
  source: /note="3' tri-ethylene glycol (TEG)"
ccagucgguaaguucugucc

SEQ ID NO: 18793 - RNA, 19 nt, Artificial Sequence
  source: /note="Description of Artificial Sequence: Synthetic oligonucleotide"
  source: /note="RNA"
  source: /note="5' tri-ethylene glycol (TEG)"
  modified_base (1)..(1): 5-methyl bicyclic nucleic acid
  modified_base (2)..(2): 5-methyl bicyclic nucleic acid
  modified_base (6)..(6): 5-methyl modified nucleotide
  modified_base (15)..(15): 5-methyl modified nucleotide
  modified_base (19)..(19): 5-methyl modified nucleotide
  source: /note="3' tri-ethylene glycol (TEG)"
ccagucgguaaguucuguc

SEQ ID NO: 18794 - RNA, 18 nt, Artificial Sequence
  source: /note="Description of Artificial Sequence: Synthetic oligonucleotide"
  source: /note="RNA"
  source: /note="5' tri-ethylene glycol (TEG)"
  modified_base (1)..(1): 5-methyl bicyclic nucleic acid
  modified_base (2)..(2): 5-methyl bicyclic nucleic acid
  modified_base (6)..(6): 5-methyl modified nucleotide
  modified_base (15)..(15): 5-methyl modified nucleotide
  source: /note="3' tri-ethylene glycol (TEG)"
ccagucgguaaguucugu

SEQ ID NO: 18795 - RNA, 17 nt, Artificial Sequence
  source: /note="Description of Artificial Sequence: Synthetic oligonucleotide"
  source: /note="RNA"
  source: /note="5' tri-ethylene glycol (TEG)"
  modified_base (1)..(1): 5-methyl bicyclic nucleic acid
  modified_base (2)..(2): 5-methyl bicyclic nucleic acid
  modified_base (6)..(6): 5-methyl modified nucleotide
  modified_base (15)..(15): 5-methyl modified nucleotide
  source: /note="3' tri-ethylene glycol (TEG)"
ccagucgguaaguucug

SEQ ID NO: 18796 - RNA, 16 nt, Artificial Sequence
  source: /note="Description of Artificial Sequence: Synthetic oligonucleotide"
  source: /note="RNA"
  source: /note="5' tri-ethylene glycol (TEG)"
  modified_base (1)..(1): 5-methyl bicyclic nucleic acid
  modified_base (2)..(2): 5-methyl bicyclic nucleic acid
  modified_base (6)..(6): 5-methyl modified nucleotide
  modified_base (15)..(15): 5-methyl modified nucleotide
  source: /note="3' tri-ethylene glycol (TEG)"
ccagucgguaaguucu

SEQ ID NO: 18797 - RNA, 15 nt, Artificial Sequence
  source: /note="Description of Artificial Sequence: Synthetic oligonucleotide"
  source: /note="RNA"
  source: /note="5' tri-ethylene glycol (TEG)"
  modified_base (1)..(1): 5-methyl bicyclic nucleic acid
  modified_base (2)..(2): 5-methyl bicyclic nucleic acid
  modified_base (6)..(6): 5-methyl modified nucleotide
  modified_base (15)..(15): 5-methyl modified nucleotide
  source: /note="3' tri-ethylene glycol (TEG)"
ccagucgguaaguuc

SEQ ID NO: 18798 - RNA, 14 nt, Artificial Sequence
  source: /note="Description of Artificial Sequence: Synthetic oligonucleotide"
  source: /note="RNA"
  source: /note="5' tri-ethylene glycol (TEG)"
  modified_base (1)..(1): 5-methyl bicyclic nucleic acid
  modified_base (2)..(2): 5-methyl bicyclic nucleic acid
  modified_base (6)..(6): 5-methyl modified nucleotide
  source: /note="3' tri-ethylene glycol (TEG)"
ccagucgguaaguu

SEQ ID NO: 18799 - RNA, 13 nt, Artificial Sequence
  source: /note="Description of Artificial Sequence: Synthetic oligonucleotide"
  source: /note="RNA"
  source: /note="5' tri-ethylene glycol (TEG)"
  modified_base (1)..(1): 5-methyl bicyclic nucleic acid
  modified_base (2)..(2): 5-methyl bicyclic nucleic acid
  modified_base (6)..(6): 5-methyl modified nucleotide
  source: /note="3' tri-ethylene glycol (TEG)"
ccagucgguaagu

SEQ ID NO: 18800 - RNA, 20 nt, Artificial Sequence
  source: /note="Description of Artificial Sequence: Synthetic oligonucleotide"
  source: /note="RNA"
  source: /note="5' tri-ethylene glycol (TEG)"
  modified_base (1)..(1): bicyclic nucleic acid (BNA)
  modified_base (2)..(2): 5-methyl bicyclic nucleic acid
  modified_base (3)..(3): 5-methyl modified nucleotide
  modified_base (7)..(7): 5-methyl modified nucleotide
  modified_base (16)..(16): 5-methyl modified nucleotide
  modified_base (20)..(20): 5-methyl modified nucleotide
  source: /note="3' tri-ethylene glycol (TEG)"
gccagucgguaaguucuguc

SEQ ID NO: 18801 - RNA, 19 nt, Artificial Sequence
  source: /note="Description of Artificial Sequence: Synthetic oligonucleotide"
  source: /note="RNA"
  source: /note="5' tri-ethylene glycol (TEG)"
  modified_base (1)..(1): bicyclic nucleic acid (BNA)
  modified_base (2)..(2): 5-methyl bicyclic nucleic acid
  modified_base (3)..(3): 5-methyl modified nucleotide
  modified_base (7)..(7): 5-methyl modified nucleotide
  modified_base (16)..(16): 5-methyl modified nucleotide
  source: /note="3' tri-ethylene glycol (TEG)"
gccagucgguaaguucugu

SEQ ID NO: 18802 - RNA, 18 nt, Artificial Sequence
  source: /note="Description of Artificial Sequence: Synthetic oligonucleotide"
  source: /note="RNA"
  source: /note="5' tri-ethylene glycol (TEG)"
  modified_base (1)..(1): bicyclic nucleic acid (BNA)
  modified_base (2)..(2): 5-methyl bicyclic nucleic acid
  modified_base (3)..(3): 5-methyl modified nucleotide
  modified_base (7)..(7): 5-methyl modified nucleotide
  modified_base (16)..(16): 5-methyl modified nucleotide
  source: /note="3' tri-ethylene glycol (TEG)"
gccagucgguaaguucug

SEQ ID NO: 18803 - RNA, 17 nt, Artificial Sequence
  source: /note="Description of Artificial Sequence: Synthetic oligonucleotide"
  source: /note="RNA"
  source: /note="5' tri-ethylene glycol (TEG)"
  modified_base (1)..(1): bicyclic nucleic acid (BNA)
  modified_base (2)..(2): 5-methyl bicyclic nucleic acid
  modified_base (3)..(3): 5-methyl modified nucleotide
  modified_base (7)..(7): 5-methyl modified nucleotide
  modified_base (16)..(16): 5-methyl modified nucleotide
  source: /note="3' tri-ethylene glycol (TEG)"
gccagucgguaaguucu

SEQ ID NO: 18804 - RNA, 16 nt, Artificial Sequence
  source: /note="Description of Artificial Sequence: Synthetic oligonucleotide"
  source: /note="RNA"
  source: /note="5' tri-ethylene glycol (TEG)"
  modified_base (1)..(1): bicyclic nucleic acid (BNA)
  modified_base (2)..(2): 5-methyl bicyclic nucleic acid
  modified_base (3)..(3): 5-methyl modified nucleotide
  modified_base (7)..(7): 5-methyl modified nucleotide
  modified_base (16)..(16): 5-methyl modified nucleotide
  source: /note="3' tri-ethylene glycol (TEG)"
gccagucgguaaguuc

SEQ ID NO: 18805 - RNA, 15 nt, Artificial Sequence
  source: /note="Description of Artificial Sequence: Synthetic oligonucleotide"
  source: /note="RNA"
  source: /note="5' tri-ethylene glycol (TEG)"
  modified_base (1)..(1): bicyclic nucleic acid (BNA)
  modified_base (2)..(2): 5-methyl bicyclic nucleic acid
  modified_base (3)..(3): 5-methyl modified nucleotide
  modified_base (7)..(7): 5-methyl modified nucleotide
  source: /note="3' tri-ethylene glycol (TEG)"
gccagucgguaaguu

SEQ ID NO: 18806 - RNA, 14 nt, Artificial Sequence
  source: /note="Description of Artificial Sequence: Synthetic oligonucleotide"
  source: /note="RNA"
  source: /note="5' tri-ethylene glycol (TEG)"
  modified_base (1)..(1): bicyclic nucleic acid (BNA)
  modified_base (2)..(2): 5-methyl bicyclic nucleic acid
  modified_base (3)..(3): 5-methyl modified nucleotide
  modified_base (7)..(7): 5-methyl modified nucleotide
  source: /note="3' tri-ethylene glycol (TEG)"
gccagucgguaagu

SEQ ID NO: 18807 - DNA, 20 bp, Artificial Sequence
  source: /note="Description of Artificial Sequence: Synthetic oligonucleotide"
  source: /note="Description of Combined DNA/RNA Molecule: Synthetic oligonucleotide"
  source: /note="DNA/RNA"
  source: /note="5' tri-ethylene glycol (TEG)"
  modified_base (1)..(1): bicyclic nucleic acid (BNA)
  modified_base (2)..(2): 5-methyl bicyclic nucleic acid
  modified_base (14)..(14): 5-methyl modified nucleotide
  modified_base (19)..(19): 5-methyl modified nucleotide
  source: /note="3' tri-ethylene glycol (TEG)"
tcaaggaagauggcauuucu

SEQ ID NO: 18808 - DNA, 22 bp, Artificial Sequence
  source: /note="Description of Artificial Sequence: Synthetic oligonucleotide"
  source: /note="Description of Combined DNA/RNA Molecule: Synthetic oligonucleotide"
  source: /note="DNA/RNA"
  source: /note="5' tri-ethylene glycol (TEG)"
  modified_base (1)..(1): bicyclic nucleic acid (BNA)
  modified_base (2)..(2): 5-methyl bicyclic nucleic acid
  modified_base (14)..(14): 5-methyl modified nucleotide
  modified_base (19)..(19): 5-methyl modified nucleotide
  source: /note="3' tri-ethylene glycol (TEG)"
tcaaggaagauggcauuucuag

SEQ ID NO: 18809 - DNA, 16 bp, Artificial Sequence
  source: /note="Description of Artificial Sequence: Synthetic oligonucleotide"
  source: /note="Description of Combined DNA/RNA Molecule: Synthetic oligonucleotide"
  source: /note="DNA/RNA"
  source: /note="5' tri-ethylene glycol (TEG)"
  modified_base (1)..(1): bicyclic nucleic acid (BNA)
  modified_base (2)..(2): 5-methyl bicyclic nucleic acid
  modified_base (14)..(14): 5-methyl modified nucleotide
  source: /note="3' tri-ethylene glycol (TEG)"
tcaaggaagauggcau

SEQ ID NO: 18810 - RNA, 15 nt, Artificial Sequence
  source: /note="Description of Artificial Sequence: Synthetic oligonucleotide"
  source: /note="RNA"
  source: /note="5' tri-ethylene glycol (TEG)"
  modified_base (1)..(1): bicyclic nucleic acid (BNA)
  modified_base (2)..(2): bicyclic nucleic acid (BNA)
  modified_base (9)..(9): 5-methyl modified nucleotide
  modified_base (14)..(14): 5-methyl modified nucleotide
  source: /note="3' tri-ethylene glycol (TEG)"
gaagauggcauuucu

SEQ ID NO: 18811 - DNA, 21 bp, Artificial Sequence
  source: /note="Description of Artificial Sequence: Synthetic oligonucleotide"
  source: /note="Description of Combined DNA/RNA Molecule: Synthetic oligonucleotide"
  source: /note="DNA/RNA"
  source: /note="5' tri-ethylene glycol (TEG)"
  modified_base (1)..(1): bicyclic nucleic acid (BNA)
  modified_base (2)..(2): 5-methyl bicyclic nucleic acid
  modified_base (14)..(14): 5-methyl modified nucleotide
  modified_base (19)..(19): 5-methyl modified nucleotide
  source: /note="3' tri-ethylene glycol (TEG)"
tcaaggaagauggcauuucua

SEQ ID NO: 18812 - DNA, 19 bp, Artificial Sequence
  source: /note="Description of Artificial Sequence: Synthetic oligonucleotide"
  source: /note="Description of Combined DNA/RNA Molecule: Synthetic oligonucleotide"
  source: /note="DNA/RNA"
  source: /note="5' tri-ethylene glycol (TEG)"
  modified_base (1)..(1): bicyclic nucleic acid (BNA)
  modified_base (2)..(2): 5-methyl bicyclic nucleic acid
  modified_base (14)..(14): 5-methyl modified nucleotide
  modified_base (19)..(19): 5-methyl modified nucleotide
  source: /note="3' tri-ethylene glycol (TEG)"
tcaaggaagauggcauuuc

SEQ ID NO: 18813 - DNA, 18 bp, Artificial Sequence
  source: /note="Description of Artificial Sequence: Synthetic oligonucleotide"
  source: /note="Description of Combined DNA/RNA Molecule: Synthetic oligonucleotide"
  source: /note="DNA/RNA"
  source: /note="5' tri-ethylene glycol (TEG)"
  modified_base (1)..(1): bicyclic nucleic acid (BNA)
  modified_base (2)..(2): 5-methyl bicyclic nucleic acid
  modified_base (14)..(14): 5-methyl modified nucleotide
  source: /note="3' tri-ethylene glycol (TEG)"
tcaaggaagauggcauuu

SEQ ID NO: 18814 - DNA, 17 bp, Artificial Sequence
  source: /note="Description of Artificial Sequence: Synthetic oligonucleotide"
  source: /note="Description of Combined DNA/RNA Molecule: Synthetic oligonucleotide"
  source: /note="DNA/RNA"
  source: /note="5' tri-ethylene glycol (TEG)"
  modified_base (1)..(1): bicyclic nucleic acid (BNA)
  modified_base (2)..(2): 5-methyl bicyclic nucleic acid
  modified_base (14)..(14): 5-methyl modified nucleotide
  source: /note="3' tri-ethylene glycol (TEG)"
tcaaggaagauggcauu

SEQ ID NO: 18815 - DNA, 15 bp, Artificial Sequence
  source: /note="Description of Artificial Sequence: Synthetic oligonucleotide"
  source: /note="Description of Combined DNA/RNA Molecule: Synthetic oligonucleotide"
  source: /note="DNA/RNA"
  source: /note="5' tri-ethylene glycol (TEG)"
  modified_base (1)..(1): bicyclic nucleic acid (BNA)
  modified_base (2)..(2): 5-methyl bicyclic nucleic acid
  modified_base (14)..(14): 5-methyl modified nucleotide
  source: /note="3' tri-ethylene glycol (TEG)"
tcaaggaagauggca

SEQ ID NO: 18816 - DNA, 14 bp, Artificial Sequence
  source: /note="Description of Artificial Sequence: Synthetic oligonucleotide"
  source: /note="Description of Combined DNA/RNA Molecule: Synthetic oligonucleotide"
  source: /note="DNA/RNA"
  source: /note="5' tri-ethylene glycol (TEG)"
  modified_base (1)..(1): bicyclic nucleic acid (BNA)
  modified_base (2)..(2): 5-methyl bicyclic nucleic acid
  modified_base (14)..(14): 5-methyl modified nucleotide
  source: /note="3' tri-ethylene glycol (TEG)"
tcaaggaagauggc

SEQ ID NO: 18817 - DNA, 13 bp, Artificial Sequence
  source: /note="Description of Artificial Sequence: Synthetic oligonucleotide"
  source: /note="Description of Combined DNA/RNA Molecule: Synthetic oligonucleotide"
  source: /note="DNA/RNA"
  source: /note="5' tri-ethylene glycol (TEG)"
  modified_base (1)..(1): bicyclic nucleic acid (BNA)
  modified_base (2)..(2): 5-methyl bicyclic nucleic acid
  source: /note="3' tri-ethylene glycol (TEG)"
tcaaggaagaugg

SEQ ID NO: 18818 - DNA, 12 bp, Artificial Sequence
  source: /note="Description of Artificial Sequence: Synthetic oligonucleotide"
  source: /note="Description of Combined DNA/RNA Molecule: Synthetic oligonucleotide"
  source: /note="DNA/RNA"
  source: /note="5' tri-ethylene glycol (TEG)"
  modified_base (1)..(1): bicyclic nucleic acid (BNA)
  modified_base (2)..(2): 5-methyl bicyclic nucleic acid
  source: /note="3' tri-ethylene glycol (TEG)"
tcaaggaagaug

SEQ ID NO: 18819 - DNA, 11 bp, Artificial Sequence
  source: /note="Description of Artificial Sequence: Synthetic oligonucleotide"
  source: /note="Description of Combined DNA/RNA Molecule: Synthetic oligonucleotide"
  source: /note="DNA/RNA"
  source: /note="5' tri-ethylene glycol (TEG)"
  modified_base (1)..(1): bicyclic nucleic acid (BNA)
  modified_base (2)..(2): 5-methyl bicyclic nucleic acid
  source: /note="3' tri-ethylene glycol (TEG)"
tcaaggaagau

SEQ ID NO: 18820 - DNA, 10 bp, Artificial Sequence
  source: /note="Description of Artificial Sequence: Synthetic oligonucleotide"
  source: /note="DNA/RNA"
  source: /note="5' tri-ethylene glycol (TEG)"
  modified_base (1)..(1): bicyclic nucleic acid (BNA)
  modified_base (2)..(2): 5-methyl bicyclic nucleic acid
  source: /note="3' tri-ethylene glycol (TEG)"
tcaaggaaga

SEQ ID NO: 18821 - DNA, 9 bp, Artificial Sequence
  source: /note="Description of Artificial Sequence: Synthetic oligonucleotide"
  source: /note="DNA/RNA"
  source: /note="5' tri-ethylene glycol (TEG)"
  modified_base (1)..(1): bicyclic nucleic acid (BNA)
  modified_base (2)..(2): 5-methyl bicyclic nucleic acid
  source: /note="3' tri-ethylene glycol (TEG)"
tcaaggaag

SEQ ID NO: 18822 - RNA, 21 nt, Artificial Sequence
  source: /note="Description of Artificial Sequence: Synthetic oligonucleotide"
  source: /note="RNA"
  source: /note="5' tri-ethylene glycol (TEG)"
  modified_base (1)..(1): 5-methyl bicyclic nucleic acid
  modified_base (2)..(2): bicyclic nucleic acid (BNA)
  modified_base (13)..(13): 5-methyl modified nucleotide
  modified_base (18)..(18): 5-methyl modified nucleotide
  source: /note="3' tri-ethylene glycol (TEG)"
caaggaagauggcauuucuag

SEQ ID NO: 18823 - RNA, 20 nt, Artificial Sequence
  source: /note="Description of Artificial Sequence: Synthetic oligonucleotide"
  source: /note="RNA"
  source: /note="5' tri-ethylene glycol (TEG)"
  modified_base (1)..(1): 5-methyl bicyclic nucleic acid
  modified_base (2)..(2): bicyclic nucleic acid (BNA)
  modified_base (13)..(13): 5-methyl modified nucleotide
  modified_base (18)..(18): 5-methyl modified nucleotide
  source: /note="3' tri-ethylene glycol (TEG)"
caaggaagauggcauuucua

SEQ ID NO: 18824 - RNA, 19 nt, Artificial Sequence
  source: /note="Description of Artificial Sequence: Synthetic oligonucleotide"
  source: /note="RNA"
  source: /note="5' tri-ethylene glycol (TEG)"
  modified_base (1)..(1): 5-methyl bicyclic nucleic acid
  modified_base (2)..(2): bicyclic nucleic acid (BNA)
  modified_base (13)..(13): 5-methyl modified nucleotide
  modified_base (18)..(18): 5-methyl modified nucleotide
  source: /note="3' tri-ethylene glycol (TEG)"
caaggaagauggcauuucu

SEQ ID NO: 18825 - RNA, 18 nt, Artificial Sequence
  source: /note="Description of Artificial Sequence: Synthetic oligonucleotide"
  source: /note="RNA"
  source: /note="5' tri-ethylene glycol (TEG)"
  modified_base (1)..(1): 5-methyl bicyclic nucleic acid
  modified_base (2)..(2): bicyclic nucleic acid (BNA)
  modified_base (13)..(13): 5-methyl modified nucleotide
  modified_base (18)..(18): 5-methyl modified nucleotide
  source: /note="3' tri-ethylene glycol (TEG)"
caaggaagauggcauuuc

SEQ ID NO: 18826 - RNA, 17 nt, Artificial Sequence
  source: /note="Description of Artificial Sequence: Synthetic oligonucleotide"
  source: /note="RNA"
  source: /note="5' tri-ethylene glycol (TEG)"
  modified_base (1)..(1): 5-methyl bicyclic nucleic acid
  modified_base (2)..(2): bicyclic nucleic acid (BNA)
  modified_base (13)..(13): 5-methyl modified nucleotide
  source: /note="3' tri-ethylene glycol (TEG)"
caaggaagauggcauuu

SEQ ID NO: 18827 - RNA, 16 nt, Artificial Sequence
  source: /note="Description of Artificial Sequence: Synthetic oligonucleotide"
  source: /note="RNA"
  source: /note="5' tri-ethylene glycol (TEG)"
  modified_base (1)..(1): 5-methyl bicyclic nucleic acid
  modified_base (2)..(2): bicyclic nucleic acid (BNA)
  modified_base (13)..(13): 5-methyl modified nucleotide
  source: /note="3' tri-ethylene glycol (TEG)"
caaggaagauggcauu

SEQ ID NO: 18828 - RNA, 15 nt, Artificial Sequence
  source: /note="Description of Artificial Sequence: Synthetic oligonucleotide"
  source: /note="RNA"
  source: /note="5' tri-ethylene glycol (TEG)"
  modified_base (1)..(1): 5-methyl bicyclic nucleic acid
  modified_base (2)..(2): bicyclic nucleic acid (BNA)
  modified_base (13)..(13): 5-methyl modified nucleotide
  source: /note="3' tri-ethylene glycol (TEG)"
caaggaagauggcau

SEQ ID NO: 18829 - RNA, 14 nt, Artificial Sequence
  source: /note="Description of Artificial Sequence: Synthetic oligonucleotide"
  source: /note="RNA"
  source: /note="5' tri-ethylene glycol (TEG)"
  modified_base (1)..(1): 5-methyl bicyclic nucleic acid
  modified_base (2)..(2): bicyclic nucleic acid (BNA)
  modified_base (13)..(13): 5-methyl modified nucleotide
  source: /note="3' tri-ethylene glycol (TEG)"
caaggaagauggca

SEQ ID NO: 18830 - RNA, 13 nt, Artificial Sequence
  source: /note="Description of Artificial Sequence: Synthetic oligonucleotide"
  source: /note="RNA"
  source: /note="5' tri-ethylene glycol (TEG)"
  modified_base (1)..(1): 5-methyl bicyclic nucleic acid
  modified_base (2)..(2): bicyclic nucleic acid (BNA)
  modified_base (13)..(13): 5-methyl modified nucleotide
  source: /note="3' tri-ethylene glycol (TEG)"
caaggaagauggc

SEQ ID NO: 18831 - RNA, 12 nt, Artificial Sequence
  source: /note="Description of Artificial Sequence: Synthetic oligonucleotide"
  source: /note="RNA"
  source: /note="5' tri-ethylene glycol (TEG)"
  modified_base (1)..(1): 5-methyl bicyclic nucleic acid
  modified_base (2)..(2): bicyclic nucleic acid (BNA)
  source: /note="3' tri-ethylene glycol (TEG)"
caaggaagaugg

SEQ ID NO: 18832 - RNA, 11 nt, Artificial Sequence
  source: /note="Description of Artificial Sequence: Synthetic oligonucleotide"
  source: /note="RNA"
  source: /note="5' tri-ethylene glycol (TEG)"
  modified_base (1)..(1): 5-methyl bicyclic nucleic acid
  modified_base (2)..(2): bicyclic nucleic acid (BNA)
  source: /note="3' tri-ethylene glycol (TEG)"
caaggaagaug

SEQ ID NO: 18833 - RNA, 10 nt, Artificial Sequence
  source: /note="Description of Artificial Sequence: Synthetic oligonucleotide"
  source: /note="RNA"
  source: /note="5' tri-ethylene glycol (TEG)"
  modified_base (1)..(1): 5-methyl bicyclic nucleic acid
  modified_base (2)..(2): bicyclic nucleic acid (BNA)
  source: /note="3' tri-ethylene glycol (TEG)"
caaggaagau

SEQ ID NO: 18834 - RNA, 9 nt, Artificial Sequence
  source: /note="Description of Artificial Sequence: Synthetic oligonucleotide"
  source: /note="RNA/Antisense Oligonucleotide"
  source: /note="5' tri-ethylene glycol (TEG)"
  modified_base (1)..(1): 5-methyl bicyclic nucleic acid
  modified_base (2)..(2): bicyclic nucleic acid (BNA)
  source: /note="3' tri-ethylene glycol (TEG)"
caaggaaga

SEQ ID NO: 18835 - RNA, 8 nt, Artificial Sequence
  source: /note="Description of Artificial Sequence: Synthetic oligonucleotide"
  source: /note="RNA/Antisense Oligonucleotide"
  source: /note="5' tri-ethylene glycol (TEG)"
  modified_base (1)..(1): 5-methyl bicyclic nucleic acid
  modified_base (2)..(2): bicyclic nucleic acid (BNA)
  source: /note="3' tri-ethylene glycol (TEG)"
caaggaag

SEQ ID NO: 18836 - RNA, 20 nt, Artificial Sequence
  source: /note="Description of Artificial Sequence: Synthetic oligonucleotide"
  source: /note="RNA"
  source: /note="5' tri-ethylene glycol (TEG)"
  modified_base (1)..(1): bicyclic nucleic acid (BNA)
  modified_base (2)..(2): bicyclic nucleic acid (BNA)
  modified_base (12)..(12): 5-methyl modified nucleotide
  modified_base (17)..(17): 5-methyl modified nucleotide
  source: /note="3' tri-ethylene glycol (TEG)"
aaggaagauggcauuucuag

SEQ ID NO: 18837 - RNA, 19 nt, Artificial Sequence
  source: /note="Description of Artificial Sequence: Synthetic oligonucleotide"
  source: /note="RNA"
  source: /note="5' tri-ethylene glycol (TEG)"
  modified_base (1)..(1): bicyclic nucleic acid (BNA)
  modified_base (2)..(2): bicyclic nucleic acid (BNA)
  modified_base (12)..(12): 5-methyl modified nucleotide
  modified_base (17)..(17): 5-methyl modified nucleotide
  source: /note="3' tri-ethylene glycol (TEG)"
aaggaagauggcauuucua

SEQ ID NO: 18838 - RNA, 18 nt, Artificial Sequence
  source: /note="Description of Artificial Sequence: Synthetic oligonucleotide"
  source: /note="RNA"
  source: /note="5' tri-ethylene glycol (TEG)"
  modified_base (1)..(1): bicyclic nucleic acid (BNA)
  modified_base (2)..(2): bicyclic nucleic acid (BNA)
  modified_base (12)..(12): 5-methyl modified nucleotide
  modified_base (17)..(17): 5-methyl modified nucleotide
  source: /note="3' tri-ethylene glycol (TEG)"
aaggaagauggcauuucu

SEQ ID NO: 18839 - RNA, 17 nt, Artificial Sequence
  source: /note="Description of Artificial Sequence: Synthetic oligonucleotide"
  source: /note="RNA"
  source: /note="5' tri-ethylene glycol (TEG)"
  modified_base (1)..(1): bicyclic nucleic acid (BNA)
  modified_base (2)..(2): bicyclic nucleic acid (BNA)
  modified_base (12)..(12): 5-methyl modified nucleotide
  modified_base (17)..(17): 5-methyl modified nucleotide
  source: /note="3' tri-ethylene glycol (TEG)"
aaggaagauggcauuuc

SEQ ID NO: 18840 - RNA, 16 nt, Artificial Sequence
  source: /note="Description of Artificial Sequence: Synthetic oligonucleotide"
  source: /note="RNA"
  source: /note="5' tri-ethylene glycol (TEG)"
  modified_base (1)..(1): bicyclic nucleic acid (BNA)
  modified_base (2)..(2): bicyclic nucleic acid (BNA)
  modified_base (12)..(12): 5-methyl modified nucleotide
  source: /note="3' tri-ethylene glycol (TEG)"
aaggaagauggcauuu

SEQ ID NO: 18841 - RNA, 15 nt, Artificial Sequence
  source: /note="Description of Artificial Sequence: Synthetic oligonucleotide"
  source: /note="RNA"
  source: /note="5' tri-ethylene glycol (TEG)"
  modified_base (1)..(1): bicyclic nucleic acid (BNA)
  modified_base (2)..(2): bicyclic nucleic acid (BNA)
  modified_base (12)..(12): 5-methyl modified nucleotide
  source: /note="3' tri-ethylene glycol (TEG)"
aaggaagauggcauu

SEQ ID NO: 18842 - RNA, 14 nt, Artificial Sequence
  source: /note="Description of Artificial Sequence: Synthetic oligonucleotide"
  source: /note="RNA"
  source: /note="5' tri-ethylene glycol (TEG)"
  modified_base (1)..(1): bicyclic nucleic acid (BNA)
  modified_base (2)..(2): bicyclic nucleic acid (BNA)
  modified_base (12)..(12): 5-methyl modified nucleotide
  source: /note="3' tri-ethylene glycol (TEG)"
aaggaagauggcau

SEQ ID NO: 18843 - RNA, 13 nt, Artificial Sequence
  source: /note="Description of Artificial Sequence: Synthetic oligonucleotide"
  source: /note="RNA"
  source: /note="5' tri-ethylene glycol (TEG)"
  modified_base (1)..(1): bicyclic nucleic acid (BNA)
  modified_base (2)..(2): bicyclic nucleic acid (BNA)
  modified_base (12)..(12): 5-methyl modified nucleotide
  source: /note="3' tri-ethylene glycol (TEG)"
aaggaagauggca

SEQ ID NO: 18844 - RNA, 12 nt, Artificial Sequence
  source: /note="Description of Artificial Sequence: Synthetic oligonucleotide"
  source: /note="RNA"
  source: /note="5' tri-ethylene glycol (TEG)"
  modified_base (1)..(1): bicyclic nucleic acid (BNA)
  modified_base (2)..(2): bicyclic nucleic acid (BNA)
  modified_base (12)..(12): 5-methyl modified nucleotide
  source: /note="3' tri-ethylene glycol (TEG)"
aaggaagauggc

SEQ ID NO: 18845 - RNA, 11 nt, Artificial Sequence
  source: /note="Description of Artificial Sequence: Synthetic oligonucleotide"
  source: /note="RNA"
  source: /note="5' tri-ethylene glycol (TEG)"
  modified_base (1)..(1): bicyclic nucleic acid (BNA)
  modified_base (2)..(2): bicyclic nucleic acid (BNA)
  source: /note="3' tri-ethylene glycol (TEG)"
aaggaagaugg

SEQ ID NO: 18846 - RNA, 10 nt, Artificial Sequence
  source: /note="Description of Artificial Sequence: Synthetic oligonucleotide"
  source: /note="RNA"
  source: /note="5' tri-ethylene glycol (TEG)"
  modified_base (1)..(1): bicyclic nucleic acid (BNA)
  modified_base (2)..(2): bicyclic nucleic acid (BNA)
  source: /note="3' tri-ethylene glycol (TEG)"
aaggaagaug

SEQ ID NO: 18847 - RNA, 9 nt, Artificial Sequence
  source: /note="Description of Artificial Sequence: Synthetic oligonucleotide"
  source: /note="RNA"
  source: /note="5' tri-ethylene glycol (TEG)"
  modified_base (1)..(1): bicyclic nucleic acid (BNA)
  modified_base (2)..(2): bicyclic nucleic acid (BNA)
  source: /note="3' tri-ethylene glycol (TEG)"
aaggaagau

SEQ ID NO: 18848 - RNA, 8 nt, Artificial Sequence
  source: /note="Description of Artificial Sequence: Synthetic oligonucleotide"
  source: /note="RNA/Antisense Oligonucleotide"
  source: /note="5' tri-ethylene glycol (TEG)"
  modified_base (1)..(1): bicyclic nucleic acid (BNA)
  modified_base (2)..(2): bicyclic nucleic acid (BNA)
  source: /note="3' tri-ethylene glycol (TEG)"
aaggaaga

SEQ ID NO: 18849 - RNA, 19 nt, Artificial Sequence
  source: /note="Description of Artificial Sequence: Synthetic oligonucleotide"
  source: /note="RNA"
  source: /note="5' tri-ethylene glycol (TEG)"
  modified_base (1)..(1): bicyclic nucleic acid (BNA)
  modified_base (2)..(2): bicyclic nucleic acid (BNA)
  modified_base (11)..(11): 5-methyl modified nucleotide
  modified_base (16)..(16): 5-methyl modified nucleotide
  source: /note="3' tri-ethylene glycol (TEG)"
aggaagauggcauuucuag

SEQ ID NO: 18850 - RNA, 18 nt, Artificial Sequence
  source: /note="Description of Artificial Sequence: Synthetic oligonucleotide"
  source: /note="RNA"
  source: /note="5' tri-ethylene glycol (TEG)"
  modified_base (1)..(1): bicyclic nucleic acid (BNA)
  modified_base (2)..(2): bicyclic nucleic acid (BNA)
  modified_base (11)..(11): 5-methyl modified nucleotide
  modified_base (16)..(16): 5-methyl modified nucleotide
  source: /note="3' tri-ethylene glycol (TEG)"
aggaagauggcauuucua

SEQ ID NO: 18851 - RNA, 17 nt, Artificial Sequence
  source: /note="Description of Artificial Sequence: Synthetic oligonucleotide"
  source: /note="RNA"
  source: /note="5' tri-ethylene glycol (TEG)"
  modified_base (1)..(1): bicyclic nucleic acid (BNA)
  modified_base (2)..(2): bicyclic nucleic acid (BNA)
  modified_base (11)..(11): 5-methyl modified nucleotide
  modified_base (16)..(16): 5-methyl modified nucleotide
  source: /note="3' tri-ethylene glycol (TEG)"
aggaagauggcauuucu

SEQ ID NO: 18852 - RNA, 16 nt, Artificial Sequence
  source: /note="Description of Artificial Sequence: Synthetic oligonucleotide"
  source: /note="RNA"
  source: /note="5' tri-ethylene glycol (TEG)"
  modified_base (1)..(1): bicyclic nucleic acid (BNA)
  modified_base (2)..(2): bicyclic nucleic acid (BNA)
  modified_base (11)..(11): 5-methyl modified nucleotide
  modified_base (16)..(16): 5-methyl modified nucleotide
  source: /note="3' tri-ethylene glycol (TEG)"
aggaagauggcauuuc

SEQ ID NO: 18853 - RNA, 15 nt, Artificial Sequence
  source: /note="Description of Artificial Sequence: Synthetic oligonucleotide"
  source: /note="RNA"
  source: /note="5' tri-ethylene glycol (TEG)"
  modified_base (1)..(1): bicyclic nucleic acid (BNA)
  modified_base (2)..(2): bicyclic nucleic acid (BNA)
  modified_base (11)..(11): 5-methyl modified nucleotide
  source: /note="3' tri-ethylene glycol (TEG)"
aggaagauggcauuu

SEQ ID NO: 18854 - RNA, 14 nt, Artificial Sequence
  source: /note="Description of Artificial Sequence: Synthetic oligonucleotide"
  source: /note="RNA"
  source: /note="5' tri-ethylene glycol (TEG)"
  modified_base (1)..(1): bicyclic nucleic acid (BNA)
  modified_base (2)..(2): bicyclic nucleic acid (BNA)
  modified_base (11)..(11): 5-methyl modified nucleotide
  source: /note="3' tri-ethylene glycol (TEG)"
aggaagauggcauu

SEQ ID NO: 18855 - RNA, 13 nt, Artificial Sequence
  source: /note="Description of Artificial Sequence: Synthetic oligonucleotide"
  source: /note="RNA"
  source: /note="5' tri-ethylene glycol (TEG)"
  modified_base (1)..(1): bicyclic nucleic acid (BNA)
  modified_base (2)..(2): bicyclic nucleic acid (BNA)
  modified_base (11)..(11): 5-methyl modified nucleotide
  source: /note="3' tri-ethylene glycol (TEG)"
aggaagauggcau

SEQ ID NO: 18856 - RNA, 12 nt, Artificial Sequence
  source: /note="Description of Artificial Sequence: Synthetic oligonucleotide"
  source: /note="RNA"
  source: /note="5' tri-ethylene glycol (TEG)"
  modified_base (1)..(1): bicyclic nucleic acid (BNA)
  modified_base (2)..(2): bicyclic nucleic acid (BNA)
  modified_base (11)..(11): 5-methyl modified nucleotide
  source: /note="3' tri-ethylene glycol (TEG)"
aggaagauggca

SEQ ID NO: 18857 - RNA, 10 nt, Artificial Sequence
  source: /note="Description of Artificial Sequence: Synthetic oligonucleotide"
  source: /note="RNA"
  source: /note="5' tri-ethylene glycol (TEG)"
  modified_base (1)..(1): bicyclic nucleic acid (BNA)
  modified_base (2)..(2): bicyclic nucleic acid (BNA)
  source: /note="3' tri-ethylene glycol (TEG)"
aggaagaugg

SEQ ID NO: 18858 - RNA, 9 nt, Artificial Sequence
  source: /note="Description of Artificial Sequence: Synthetic oligonucleotide"
  source: /note="RNA"
  source: /note="5' tri-ethylene glycol (TEG)"
  modified_base (1)..(1): bicyclic nucleic acid (BNA)
  modified_base (2)..(2): bicyclic nucleic acid (BNA)
  source: /note="3' tri-ethylene glycol (TEG)"
aggaagaug

SEQ ID NO: 18859 - RNA, 8 nt, Artificial Sequence
  source: /note="Description of Artificial Sequence: Synthetic oligonucleotide"
  source: /note="RNA"
  source: /note="5' tri-ethylene glycol (TEG)"
  modified_base (1)..(1): bicyclic nucleic acid (BNA)
  modified_base (2)..(2): bicyclic nucleic acid (BNA)
  source: /note="3' tri-ethylene glycol (TEG)"
aggaagau

SEQ ID NO: 18860 - RNA, 18 nt, Artificial Sequence
  source: /note="Description of Artificial Sequence: Synthetic oligonucleotide"
  source: /note="RNA"
  source: /note="5' tri-ethylene glycol (TEG)"
  modified_base (1)..(1): bicyclic nucleic acid (BNA)
  modified_base (2)..(2): bicyclic nucleic acid (BNA)
  modified_base (10)..(10): 5-methyl modified nucleotide
  modified_base (15)..(15): 5-methyl modified nucleotide
  source: /note="3' tri-ethylene glycol (TEG)"
ggaagauggcauuucuag

SEQ ID NO: 18861 - RNA, 17 nt, Artificial Sequence
  source: /note="Description of Artificial Sequence: Synthetic oligonucleotide"
  source: /note="RNA"
  source: /note="5' tri-ethylene glycol (TEG)"
  modified_base (1)..(1): bicyclic nucleic acid (BNA)
  modified_base (2)..(2): bicyclic nucleic acid (BNA)
  modified_base (10)..(10): 5-methyl modified nucleotide
  modified_base (15)..(15): 5-methyl modified nucleotide
  source: /note="3' tri-ethylene glycol (TEG)"
ggaagauggcauuucua

SEQ ID NO: 18862 - RNA, 16 nt, Artificial Sequence
  source: /note="Description of Artificial Sequence: Synthetic oligonucleotide"
  source: /note="RNA"
  source: /note="5' tri-ethylene glycol (TEG)"
  modified_base (1)..(1): bicyclic nucleic acid (BNA)
  modified_base (2)..(2): bicyclic nucleic acid (BNA)
  modified_base (10)..(10): 5-methyl modified nucleotide
  modified_base (15)..(15): 5-methyl modified nucleotide
  source: /note="3' tri-ethylene glycol (TEG)"
ggaagauggcauuucu

SEQ ID NO: 18863 - RNA, 15 nt, Artificial Sequence
  source: /note="Description of Artificial Sequence: Synthetic oligonucleotide"
  source: /note="RNA"
  source: /note="5' tri-ethylene glycol (TEG)"
  modified_base (1)..(1): bicyclic nucleic acid (BNA)
  modified_base (2)..(2): bicyclic nucleic acid (BNA)
  modified_base (10)..(10): 5-methyl modified nucleotide
  modified_base (15)..(15): 5-methyl modified nucleotide
  source: /note="3' tri-ethylene glycol (TEG)"
ggaagauggcauuuc

SEQ ID NO: 18864 - RNA, 14 nt, Artificial Sequence
  source: /note="Description of Artificial Sequence: Synthetic oligonucleotide"
  source: /note="RNA"
  source: /note="5' tri-ethylene glycol (TEG)"
  modified_base (1)..(1): bicyclic nucleic acid (BNA)
  modified_base (2)..(2): bicyclic nucleic acid (BNA)
  modified_base (10)..(10): 5-methyl modified nucleotide
  source: /note="3' tri-ethylene glycol (TEG)"
ggaagauggcauuu

SEQ ID NO: 18865 - RNA, 13 nt, Artificial Sequence
  source: /note="Description of Artificial Sequence: Synthetic oligonucleotide"
  source: /note="RNA"
  source: /note="5' tri-ethylene glycol (TEG)"
  modified_base (1)..(1): bicyclic nucleic acid (BNA)
  modified_base (2)..(2): bicyclic nucleic acid (BNA)
  modified_base (10)..(10): 5-methyl modified nucleotide
  source: /note="3' tri-ethylene glycol (TEG)"
ggaagauggcauu

SEQ ID NO: 18866 - RNA, 12 nt, Artificial Sequence
  source: /note="Description of Artificial Sequence: Synthetic oligonucleotide"
  source: /note="RNA"
  source: /note="5' tri-ethylene glycol (TEG)"
  modified_base (1)..(1): bicyclic nucleic acid (BNA)
  modified_base (2)..(2): bicyclic nucleic acid (BNA)
  modified_base (10)..(10): 5-methyl modified nucleotide
  source: /note="3' tri-ethylene glycol (TEG)"
ggaagauggcau

SEQ ID NO: 18867 - RNA, 11 nt, Artificial Sequence
  source: /note="Description of Artificial Sequence: Synthetic oligonucleotide"
  source: /note="RNA"
  source: /note="5' tri-ethylene glycol (TEG)"
  modified_base (1)..(1): bicyclic nucleic acid (BNA)
  modified_base (2)..(2): bicyclic nucleic acid (BNA)
  modified_base (10)..(10): 5-methyl modified nucleotide
  source: /note="3' tri-ethylene glycol (TEG)"
ggaagauggca

SEQ ID NO: 18868 - RNA, 10 nt, Artificial Sequence
  source: /note="Description of Artificial Sequence: Synthetic oligonucleotide"
  source: /note="RNA"
  source: /note="5' tri-ethylene glycol (TEG)"
  modified_base (1)..(1): bicyclic nucleic acid (BNA)
  modified_base (2)..(2): bicyclic nucleic acid (BNA)
  modified_base (10)..(10): 5-methyl modified nucleotide
  source: /note="3' tri-ethylene glycol (TEG)"
ggaagauggc

SEQ ID NO: 18869 - RNA, 8 nt, Artificial Sequence
  source: /note="Description of Artificial Sequence: Synthetic oligonucleotide"
  source: /note="RNA"
  source: /note="5' tri-ethylene glycol (TEG)"
  modified_base (1)..(1): bicyclic nucleic acid (BNA)
  modified_base (2)..(2): bicyclic nucleic acid (BNA)
  source: /note="3' tri-ethylene glycol (TEG)"
ggaagaug

SEQ ID NO: 18870 - RNA, 17 nt, Artificial Sequence
  source: /note="Description of Artificial Sequence: Synthetic oligonucleotide"
  source: /note="RNA"
  source: /note="5' tri-ethylene glycol (TEG)"
  modified_base (1)..(1): bicyclic nucleic acid (BNA)
  modified_base (2)..(2): bicyclic nucleic acid (BNA)
  modified_base (9)..(9): 5-methyl modified nucleotide
  modified_base (14)..(14): 5-methyl modified nucleotide
  source: /note="3' tri-ethylene glycol (TEG)"
gaagauggcauuucuag

SEQ ID NO: 18871 - RNA, 16 nt, Artificial Sequence
  source: /note="Description of Artificial Sequence: Synthetic oligonucleotide"
  source: /note="RNA"
  source: /note="5' tri-ethylene glycol (TEG)"
  modified_base (1)..(1): bicyclic nucleic acid (BNA)
  modified_base (2)..(2): bicyclic nucleic acid (BNA)
  modified_base (9)..(9): 5-methyl modified nucleotide
  modified_base (14)..(14): 5-methyl modified nucleotide
  source: /note="3' tri-ethylene glycol (TEG)"
gaagauggcauuucua

SEQ ID NO: 18872 - RNA, 14 nt, Artificial Sequence
  source: /note="Description of Artificial Sequence: Synthetic oligonucleotide"
  source: /note="RNA"
  source: /note="5' tri-ethylene glycol (TEG)"
  modified_base (1)..(1): bicyclic nucleic acid (BNA)
  modified_base (2)..(2): bicyclic nucleic acid (BNA)
  modified_base (9)..(9): 5-methyl modified nucleotide
  modified_base (14)..(14): 5-methyl modified nucleotide
  source: /note="3' tri-ethylene glycol (TEG)"
gaagauggcauuuc

SEQ ID NO: 18873 - RNA, 13 nt, Artificial Sequence
  source: /note="Description of Artificial Sequence: Synthetic oligonucleotide"
  source: /note="RNA"
  source: /note="5' tri-ethylene glycol (TEG)"
  modified_base (1)..(1): bicyclic nucleic acid (BNA)
  modified_base (2)..(2): bicyclic nucleic acid (BNA)
  modified_base (9)..(9): 5-methyl modified nucleotide
  source: /note="3' tri-ethylene glycol (TEG)"
gaagauggcauuu

SEQ ID NO: 18874 - RNA, 12 nt, Artificial Sequence
  source: /note="Description of Artificial Sequence: Synthetic oligonucleotide"
  source: /note="RNA"
  source: /note="5' tri-ethylene glycol (TEG)"
  modified_base (1)..(1): bicyclic nucleic acid (BNA)
  modified_base (2)..(2): bicyclic nucleic acid (BNA)
  modified_base (9)..(9): 5-methyl modified nucleotide
  source: /note="3' tri-ethylene glycol (TEG)"
gaagauggcauu

SEQ ID NO: 18875 - RNA, 11 nt, Artificial Sequence
  source: /note="Description of Artificial Sequence: Synthetic oligonucleotide"
  source: /note="RNA"
  source: /note="5' tri-ethylene glycol (TEG)"
  modified_base (1)..(1): bicyclic nucleic acid (BNA)
  modified_base (2)..(2): bicyclic nucleic acid (BNA)
  modified_base (9)..(9): 5-methyl modified nucleotide
  source: /note="3' tri-ethylene glycol (TEG)"
gaagauggcau

SEQ ID NO: 18876 - RNA, 10 nt, Artificial Sequence
  source: /note="Description of Artificial Sequence: Synthetic oligonucleotide"
  source: /note="RNA"
  source: /note="5' tri-ethylene glycol (TEG)"
  modified_base (1)..(1): bicyclic nucleic acid (BNA)
  modified_base (2)..(2): bicyclic nucleic acid (BNA)
  modified_base (9)..(9): 5-methyl modified nucleotide
  source: /note="3' tri-ethylene glycol (TEG)"
gaagauggca

SEQ ID NO: 18877 - RNA, 9 nt, Artificial Sequence
  source: /note="Description of Artificial Sequence: Synthetic oligonucleotide"
  source: /note="RNA"
  source: /note="5' tri-ethylene glycol (TEG)"
  modified_base (1)..(1): bicyclic nucleic acid (BNA)
  modified_base (2)..(2): bicyclic nucleic acid (BNA)
  modified_base (9)..(9): 5-methyl modified nucleotide
  source: /note="3' tri-ethylene glycol (TEG)"
gaagauggc

SEQ ID NO: 18878 - RNA, 8 nt, Artificial Sequence
  source: /note="Description of Artificial Sequence: Synthetic oligonucleotide"
  source: /note="RNA"
  source: /note="5' tri-ethylene glycol (TEG)"
  modified_base (1)..(1): bicyclic nucleic acid (BNA)
  modified_base (2)..(2): bicyclic nucleic acid (BNA)
  source: /note="3' tri-ethylene glycol (TEG)"
gaagaugg

SEQ ID NO: 18879 - RNA, 16 nt, Artificial Sequence
  source: /note="Description of Artificial Sequence: Synthetic oligonucleotide"
  source: /note="RNA"
  source: /note="5' tri-ethylene glycol (TEG)"
  modified_base (1)..(1): bicyclic nucleic acid (BNA)
  modified_base (2)..(2): bicyclic nucleic acid (BNA)
  modified_base (8)..(8): 5-methyl modified nucleotide
  modified_base (13)..(13): 5-methyl modified nucleotide
  source: /note="3' tri-ethylene glycol (TEG)"
aagauggcauuucuag

SEQ ID NO: 18880 - RNA, 15 nt, Artificial Sequence
  source: /note="Description of Artificial Sequence: Synthetic oligonucleotide"
  source: /note="RNA"
  source: /note="5' tri-ethylene glycol (TEG)"
  modified_base (1)..(1): bicyclic nucleic acid (BNA)
  modified_base (2)..(2): bicyclic nucleic acid (BNA)
  modified_base (8)..(8): 5-methyl modified nucleotide
  modified_base (13)..(13): 5-methyl modified nucleotide
  source: /note="3' tri-ethylene glycol (TEG)"
aagauggcauuucua

SEQ ID NO: 18881 - RNA, 14 nt, Artificial Sequence
  source: /note="Description of Artificial Sequence: Synthetic oligonucleotide"
  source: /note="RNA"
  source: /note="5' tri-ethylene glycol (TEG)"
  modified_base (1)..(1): bicyclic nucleic acid (BNA)
  modified_base (2)..(2): bicyclic nucleic acid (BNA)
  modified_base (8)..(8): 5-methyl modified nucleotide
  modified_base (13)..(13): 5-methyl modified nucleotide
  source: /note="3' tri-ethylene glycol (TEG)"
aagauggcauuucu

SEQ ID NO: 18882 - RNA, 13 nt, Artificial Sequence
  source: /note="Description of Artificial Sequence: Synthetic oligonucleotide"
  source: /note="RNA"
  source: /note="5' tri-ethylene glycol (TEG)"
  modified_base (1)..(1): bicyclic nucleic acid (BNA)
  modified_base (2)..(2): bicyclic nucleic acid (BNA)
  modified_base (8)..(8): 5-methyl modified nucleotide
  modified_base (13)..(13): 5-methyl modified nucleotide
  source: /note="3' tri-ethylene glycol (TEG)"
aagauggcauuuc

SEQ ID NO: 18883 - RNA, 12 nt, Artificial Sequence
  source: /note="Description of Artificial Sequence: Synthetic oligonucleotide"
  source: /note="RNA"
  source: /note="5' tri-ethylene glycol (TEG)"
  modified_base (1)..(1): bicyclic nucleic acid (BNA)
  modified_base (2)..(2): bicyclic nucleic acid (BNA)
  modified_base (8)..(8): 5-methyl modified nucleotide
  source: /note="3' tri-ethylene glycol (TEG)"
aagauggcauuu

SEQ ID NO: 18884 - RNA, 11 nt, Artificial Sequence
  source: /note="Description of Artificial Sequence: Synthetic oligonucleotide"
  source: /note="RNA"
  source: /note="5' tri-ethylene glycol (TEG)"
  modified_base (1)..(1): bicyclic nucleic acid (BNA)
  modified_base (2)..(2): bicyclic nucleic acid (BNA)
  modified_base (8)..(8): 5-methyl modified nucleotide
  source: /note="3' tri-ethylene glycol (TEG)"
aagauggcauu

SEQ ID NO: 18885 - RNA, 10 nt, Artificial Sequence
  source: /note="Description of Artificial Sequence: Synthetic oligonucleotide"
  source: /note="RNA"
  source: /note="5' tri-ethylene glycol (TEG)"
  modified_base (1)..(1): bicyclic nucleic acid (BNA)
  modified_base (2)..(2): bicyclic nucleic acid (BNA)
  modified_base (8)..(8): 5-methyl modified nucleotide
  source: /note="3' tri-ethylene glycol (TEG)"
aagauggcau

SEQ ID NO: 18886 - RNA, 9 nt, Artificial Sequence
  source: /note="Description of Artificial Sequence: Synthetic oligonucleotide"
  source: /note="RNA"
  source: /note="5' tri-ethylene glycol (TEG)"
  modified_base (1)..(1): bicyclic nucleic acid (BNA)
  modified_base (2)..(2): bicyclic nucleic acid (BNA)
  modified_base (8)..(8): 5-methyl modified nucleotide
  source: /note="3' tri-ethylene glycol (TEG)"
aagauggca

SEQ ID NO: 18887 - RNA, 8 nt, Artificial Sequence
  source: /note="Description of Artificial Sequence: Synthetic oligonucleotide"
  source: /note="RNA"
  source: /note="5' tri-ethylene glycol (TEG)"
  modified_base (1)..(1): bicyclic nucleic acid (BNA)
  modified_base (2)..(2): bicyclic nucleic acid (BNA)
  modified_base (8)..(8): 5-methyl modified nucleotide
  source: /note="3' tri-ethylene glycol (TEG)"
aagauggc

SEQ ID NO: 18888 - RNA, 15 nt, Artificial Sequence
  source: /note="Description of Artificial Sequence: Synthetic oligonucleotide"
  source: /note="RNA"
  source: /note="5' tri-ethylene glycol (TEG)"
  modified_base (1)..(1): bicyclic nucleic acid (BNA)
  modified_base (2)..(2): bicyclic nucleic acid (BNA)
  modified_base (7)..(7): 5-methyl modified nucleotide
  modified_base (12)..(12): 5-methyl modified nucleotide
  source: /note="3' tri-ethylene glycol (TEG)"
agauggcauuucuag

SEQ ID NO: 18889 - RNA, 14 nt, Artificial Sequence
  source: /note="Description of Artificial Sequence: Synthetic oligonucleotide"
  source: /note="RNA"
  source: /note="5' tri-ethylene glycol (TEG)"
  modified_base (1)..(1): bicyclic nucleic acid (BNA)
  modified_base (2)..(2): bicyclic nucleic acid (BNA)
  modified_base (7)..(7): 5-methyl modified nucleotide
  modified_base (12)..(12): 5-methyl modified nucleotide
  source: /note="3' tri-ethylene glycol (TEG)"
agauggcauuucua

SEQ ID NO: 18890 - RNA, 13 nt, Artificial Sequence
  source: /note="Description of Artificial Sequence: Synthetic oligonucleotide"
  source: /note="RNA"
  source: /note="5' tri-ethylene glycol (TEG)"
  modified_base (1)..(1): bicyclic nucleic acid (BNA)
  modified_base (2)..(2): bicyclic nucleic acid (BNA)
  modified_base (7)..(7): 5-methyl modified nucleotide
  modified_base (12)..(12): 5-methyl modified nucleotide
  source: /note="3' tri-ethylene glycol (TEG)"
agauggcauuucu

SEQ ID NO: 18891 - RNA, 12 nt, Artificial Sequence
  source: /note="Description of Artificial Sequence: Synthetic oligonucleotide"
  source: /note="RNA"
  source: /note="5' tri-ethylene glycol (TEG)"
  modified_base (1)..(1): bicyclic nucleic acid (BNA)
  modified_base (2)..(2): bicyclic nucleic acid (BNA)
  modified_base (7)..(7): 5-methyl modified nucleotide
  modified_base (12)..(12): 5-methyl modified nucleotide
  source: /note="3' tri-ethylene glycol (TEG)"
agauggcauuuc

SEQ ID NO: 18892 - RNA, 11 nt, Artificial Sequence
  source: /note="Description of Artificial Sequence: Synthetic oligonucleotide"
  source: /note="RNA"
  source: /note="5' tri-ethylene glycol (TEG)"
  modified_base (1)..(1): bicyclic nucleic acid (BNA)
  modified_base (2)..(2): bicyclic nucleic acid (BNA)
  modified_base (7)..(7): 5-methyl modified nucleotide
  source: /note="3' tri-ethylene glycol (TEG)"
agauggcauuu

SEQ ID NO: 18893 - RNA, 10 nt, Artificial Sequence
  source: /note="Description of Artificial Sequence: Synthetic oligonucleotide"
  source: /note="RNA"
  source: /note="5' tri-ethylene glycol (TEG)"
  modified_base (1)..(1): bicyclic nucleic acid (BNA)
  modified_base (2)..(2): bicyclic nucleic acid (BNA)
  modified_base (7)..(7): 5-methyl modified nucleotide
  source: /note="3' tri-ethylene glycol (TEG)"
agauggcauu

SEQ ID NO: 18894 - RNA, 9 nt, Artificial Sequence
  source: /note="Description of Artificial Sequence: Synthetic oligonucleotide"
  source: /note="RNA"
  source: /note="5' tri-ethylene glycol (TEG)"
  modified_base (1)..(1): bicyclic nucleic acid (BNA)
  modified_base (2)..(2): bicyclic nucleic acid (BNA)
  modified_base (7)..(7): 5-methyl modified nucleotide
  source: /note="3' tri-ethylene glycol (TEG)"
agauggcau

SEQ ID NO: 18895 - RNA, 8 nt, Artificial Sequence
  source: /note="Description of Artificial Sequence: Synthetic oligonucleotide"
  source: /note="RNA"
  source: /note="5' tri-ethylene glycol (TEG)"
  modified_base (1)..(1): bicyclic nucleic acid (BNA)
  modified_base (2)..(2): bicyclic nucleic acid (BNA)
  modified_base (7)..(7): 5-methyl modified nucleotide
  source: /note="3' tri-ethylene glycol (TEG)"
agauggca

SEQ ID NO: 18896 - DNA, 30 bp, Artificial Sequence; identical to SEQ ID NO: 8204
  source: /note="Description of Artificial Sequence: Synthetic oligonucleotide"
  source: /note="Description of Combined DNA/RNA Molecule: Synthetic oligonucleotide"
  source: /note="DNA/RNA"
  source: /note="5' tri-ethylene glycol (TEG)"
  modified_base (1)..(1): 5-methyl bicyclic nucleic acid
  modified_base (2)..(2): bicyclic nucleic acid (BNA)
  modified_base (3)..(3): 5-methyl modified nucleotide
  modified_base (4)..(4): 5-methyl modified nucleotide
  modified_base (7)..(7): 5-methyl modified nucleotide
  modified_base (10)..(10): 5-methyl modified nucleotide
  modified_base (22)..(22): 5-methyl modified nucleotide
  modified_base (27)..(27): 5-methyl modified nucleotide
  source: /note="3' tri-ethylene glycol (TEG)"

SEQ ID NO: 18897 - DNA, 29 bp, Artificial Sequence
  source: /note="Description of Artificial Sequence: Synthetic oligonucleotide"
  source: /note="Description of Combined DNA/RNA Molecule: Synthetic oligonucleotide"
  source: /note="DNA/RNA"
  source: /note="5' tri-ethylene glycol (TEG)"
  modified_base (1)..(1): 5-methyl bicyclic nucleic acid
  modified_base (2)..(2): bicyclic nucleic acid (BNA)
  modified_base (3)..(3): 5-methyl modified nucleotide
  modified_base (4)..(4): 5-methyl modified nucleotide
  modified_base (7)..(7): 5-methyl modified nucleotide
  modified_base (10)..(10): 5-methyl modified nucleotide
  modified_base (22)..(22): 5-methyl modified nucleotide
  modified_base (27)..(27): 5-methyl modified nucleotide
  source: /note="3' tri-ethylene glycol (TEG)"
ctccaacaucaaggaagauggcauuucua

SEQ ID NO: 18898 - DNA, 28 bp, Artificial Sequence
  source: /note="Description of Artificial Sequence: Synthetic oligonucleotide"
  source: /note="Description of Combined DNA/RNA Molecule: Synthetic oligonucleotide"
  source: /note="DNA/RNA"
  source: /note="5' tri-ethylene glycol (TEG)"
  modified_base (1)..(1): 5-methyl bicyclic nucleic acid
  modified_base (2)..(2): bicyclic nucleic acid (BNA)
  modified_base (3)..(3): 5-methyl modified nucleotide
  modified_base (4)..(4): 5-methyl modified nucleotide
  modified_base (7)..(7): 5-methyl modified nucleotide
  modified_base (10)..(10): 5-methyl modified nucleotide
  modified_base (22)..(22): 5-methyl modified nucleotide
  modified_base (27)..(27): 5-methyl modified nucleotide
  source: /note="3' tri-ethylene glycol (TEG)"
ctccaacaucaaggaagauggcauuucu

SEQ ID NO: 18899 - DNA, 27 bp, Artificial Sequence
  source: /note="Description of Artificial Sequence: Synthetic oligonucleotide"
  source: /note="Description of Combined DNA/RNA Molecule: Synthetic oligonucleotide"
  source: /note="DNA/RNA"
  source: /note="5' tri-ethylene glycol (TEG)"
  modified_base (1)..(1): 5-methyl bicyclic nucleic acid
  modified_base (2)..(2): bicyclic nucleic acid (BNA)
  modified_base (3)..(3): 5-methyl modified nucleotide
  modified_base (4)..(4): 5-methyl modified nucleotide
  modified_base (7)..(7): 5-methyl modified nucleotide
  modified_base (10)..(10): 5-methyl modified nucleotide
  modified_base (22)..(22): 5-methyl modified nucleotide
  modified_base (27)..(27): 5-methyl modified nucleotide
  source: /note="3' tri-ethylene glycol (TEG)"
ctccaacaucaaggaagauggcauuuc

SEQ ID NO: 18900 - DNA, 26 bp, Artificial Sequence
  source: /note="Description of Artificial Sequence: Synthetic oligonucleotide"
  source: /note="Description of Combined DNA/RNA Molecule: Synthetic oligonucleotide"
  source: /note="DNA/RNA"
  source: /note="5' tri-ethylene glycol (TEG)"
  modified_base (1)..(1): 5-methyl bicyclic nucleic acid
  modified_base (2)..(2): bicyclic nucleic acid (BNA)
  modified_base (3)..(3): 5-methyl modified nucleotide
  modified_base (4)..(4): 5-methyl modified nucleotide
  modified_base (7)..(7): 5-methyl modified nucleotide
  modified_base (10)..(10): 5-methyl modified nucleotide
  modified_base (22)..(22): 5-methyl modified nucleotide
  source: /note="3' tri-ethylene glycol (TEG)"
ctccaacaucaaggaagauggcauuu

SEQ ID NO: 18901 - DNA, 25 bp, Artificial Sequence
  source: /note="Description of Artificial Sequence: Synthetic oligonucleotide"
  source: /note="Description of Combined DNA/RNA Molecule: Synthetic oligonucleotide"
  source: /note="DNA/RNA"
  source: /note="5' tri-ethylene glycol (TEG)"
  modified_base (1)..(1): 5-methyl bicyclic nucleic acid
  modified_base (2)..(2): bicyclic nucleic acid (BNA)
  modified_base (3)..(3): 5-methyl modified nucleotide
  modified_base (4)..(4): 5-methyl modified nucleotide
  modified_base (7)..(7): 5-methyl modified nucleotide
  modified_base (10)..(10): 5-methyl modified nucleotide
  modified_base (22)..(22): 5-methyl modified nucleotide
  source: /note="3' tri-ethylene glycol (TEG)"
ctccaacaucaaggaagauggcauu

SEQ ID NO: 18902 - DNA, 24 bp, Artificial Sequence
  source: /note="Description of Artificial Sequence: Synthetic oligonucleotide"
  source: /note="Description of Combined DNA/RNA Molecule: Synthetic oligonucleotide"
  source: /note="DNA/RNA"
  source: /note="5' tri-ethylene glycol (TEG)"
  modified_base (1)..(1): 5-methyl bicyclic nucleic acid
  modified_base (2)..(2): bicyclic nucleic acid (BNA)
  modified_base (3)..(3): 5-methyl modified nucleotide
  modified_base (4)..(4): 5-methyl modified nucleotide
  modified_base (7)..(7): 5-methyl modified nucleotide
  modified_base (10)..(10): 5-methyl modified nucleotide
  modified_base (22)..(22): 5-methyl modified nucleotide
  source: /note="3' tri-ethylene glycol (TEG)"
ctccaacaucaaggaagauggcau

SEQ ID NO: 18903 - DNA, 23 bp, Artificial Sequence
  source: /note="Description of Artificial Sequence: Synthetic oligonucleotide"
  source: /note="Description of Combined DNA/RNA Molecule: Synthetic oligonucleotide"
  source: /note="DNA/RNA"
  source: /note="5' tri-ethylene glycol (TEG)"
  modified_base (1)..(1): 5-methyl bicyclic nucleic acid
  modified_base (2)..(2): bicyclic nucleic acid (BNA)
  modified_base (3)..(3): 5-methyl modified nucleotide
  modified_base (4)..(4): 5-methyl modified nucleotide
  modified_base (7)..(7): 5-methyl modified nucleotide
  modified_base (10)..(10): 5-methyl modified nucleotide
  modified_base (22)..(22): 5-methyl modified nucleotide
  source: /note="3' tri-ethylene glycol (TEG)"
ctccaacaucaaggaagauggca

SEQ ID NO: 18904 - DNA, 22 bp, Artificial Sequence
  source: /note="Description of Artificial Sequence: Synthetic oligonucleotide"
  source: /note="Description of Combined DNA/RNA Molecule: Synthetic oligonucleotide"
  source: /note="DNA/RNA"
  source: /note="5' tri-ethylene glycol (TEG)"
  modified_base (1)..(1): 5-methyl bicyclic nucleic acid
  modified_base (2)..(2): bicyclic nucleic acid (BNA)
  modified_base (3)..(3): 5-methyl modified nucleotide
  modified_base (4)..(4): 5-methyl modified nucleotide
  modified_base (7)..(7): 5-methyl modified nucleotide
  modified_base (10)..(10): 5-methyl modified nucleotide
  modified_base (22)..(22): 5-methyl modified nucleotide
  source: /note="3' tri-ethylene glycol (TEG)"
ctccaacaucaaggaagauggc

SEQ ID NO: 18905 - DNA, 21 bp, Artificial Sequence
  source: /note="Description of Artificial Sequence: Synthetic oligonucleotide"
  source: /note="Description of Combined DNA/RNA Molecule: Synthetic oligonucleotide"
  source: /note="DNA/RNA"
  source: /note="5' tri-ethylene glycol (TEG)"
  modified_base (1)..(1): 5-methyl bicyclic nucleic acid
  modified_base (2)..(2): bicyclic nucleic acid (BNA)
  modified_base (3)..(3): 5-methyl modified nucleotide
  modified_base (4)..(4): 5-methyl modified nucleotide
  modified_base (7)..(7): 5-methyl modified nucleotide
  modified_base (10)..(10): 5-methyl modified nucleotide
  source: /note="3' tri-ethylene glycol (TEG)"
ctccaacaucaaggaagaugg

SEQ ID NO: 18906 - DNA, 20 bp, Artificial Sequence
  source: /note="Description of Artificial Sequence: Synthetic oligonucleotide"
  source: /note="Description of Combined DNA/RNA Molecule: Synthetic oligonucleotide"
  source: /note="DNA/RNA"
  source: /note="5' tri-ethylene glycol (TEG)"
  modified_base (1)..(1): 5-methyl bicyclic nucleic acid
  modified_base (2)..(2): bicyclic nucleic acid (BNA)
  modified_base (3)..(3): 5-methyl modified nucleotide
  modified_base (4)..(4): 5-methyl modified nucleotide
  modified_base (7)..(7): 5-methyl modified nucleotide
  modified_base (10)..(10): 5-methyl modified nucleotide
  source: /note="3' tri-ethylene glycol (TEG)"
ctccaacaucaaggaagaug

SEQ ID NO: 18907 - DNA, 19 bp, Artificial Sequence
  source: /note="Description of Artificial Sequence: Synthetic oligonucleotide"
  source: /note="Description of Combined DNA/RNA Molecule: Synthetic oligonucleotide"
  source: /note="DNA/RNA"
  source: /note="5' tri-ethylene glycol (TEG)"
  modified_base (1)..(1): 5-methyl bicyclic nucleic acid
  modified_base (2)..(2): bicyclic nucleic acid (BNA)
  modified_base (3)..(3): 5-methyl modified nucleotide
  modified_base (4)..(4): 5-methyl modified nucleotide
  modified_base (7)..(7): 5-methyl modified nucleotide
  modified_base (10)..(10): 5-methyl modified nucleotide
  source: /note="3' tri-ethylene glycol (TEG)"
ctccaacaucaaggaagau

SEQ ID NO: 18908 - DNA, 18 bp, Artificial Sequence
  source: /note="Description of Artificial Sequence: Synthetic oligonucleotide"
  source: /note="Description of Combined DNA/RNA Molecule: Synthetic oligonucleotide"
  source: /note="DNA/RNA"
  source: /note="5' tri-ethylene glycol (TEG)"
  modified_base (1)..(1): 5-methyl bicyclic nucleic acid
  modified_base (2)..(2): bicyclic nucleic acid (BNA)
  modified_base (3)..(3): 5-methyl modified nucleotide
  modified_base (4)..(4): 5-methyl modified nucleotide
  modified_base (7)..(7): 5-methyl modified nucleotide
  modified_base (10)..(10): 5-methyl modified nucleotide
  source: /note="3' tri-ethylene glycol (TEG)"
ctccaacaucaaggaaga

SEQ ID NO: 18909 - DNA, 17 bp, Artificial Sequence
  source: /note="Description of Artificial Sequence: Synthetic oligonucleotide"
  source: /note="Description of Combined DNA/RNA Molecule: Synthetic oligonucleotide"
  source: /note="DNA/RNA"
  source: /note="5' tri-ethylene glycol (TEG)"
  modified_base (1)..(1): 5-methyl bicyclic nucleic acid
  modified_base (2)..(2): bicyclic nucleic acid (BNA)
  modified_base (3)..(3): 5-methyl modified nucleotide
  modified_base (4)..(4): 5-methyl modified nucleotide
  modified_base (7)..(7): 5-methyl modified nucleotide
  modified_base (10)..(10): 5-methyl modified nucleotide
  source: /note="3' tri-ethylene glycol (TEG)"
ctccaacaucaaggaag

SEQ ID NO: 18910 - DNA, 29 bp, Artificial Sequence
  source: /note="Description of Artificial Sequence: Synthetic oligonucleotide"
  source: /note="Description of Combined DNA/RNA Molecule: Synthetic oligonucleotide"
  source: /note="DNA/RNA"
  source: /note="5' tri-ethylene glycol (TEG)"
  modified_base (1)..(1): bicyclic nucleic acid (BNA)
  modified_base (2)..(2): 5-methyl bicyclic nucleic acid
  modified_base (3)..(3): 5-methyl modified nucleotide
  modified_base (6)..(6): 5-methyl modified nucleotide
  modified_base (9)..(9): 5-methyl modified nucleotide
  modified_base (21)..(21): 5-methyl modified nucleotide
  modified_base (26)..(26): 5-methyl modified nucleotide
  source: /note="3' tri-ethylene glycol (TEG)"
tccaacaucaaggaagauggcauuucuag

SEQ ID NO: 18911 - DNA, 28 bp, Artificial Sequence
  source: /note="Description of Artificial Sequence: Synthetic oligonucleotide"
  source: /note="Description of Combined DNA/RNA Molecule: Synthetic oligonucleotide"
  source: /note="DNA/RNA"
  source: /note="5' tri-ethylene glycol (TEG)"
  modified_base (1)..(1): bicyclic nucleic acid (BNA)
  modified_base (2)..(2): 5-methyl bicyclic nucleic acid
  modified_base (3)..(3): 5-methyl modified nucleotide
  modified_base (6)..(6): 5-methyl modified nucleotide
  modified_base (9)..(9): 5-methyl modified nucleotide
  modified_base (21)..(21): 5-methyl modified nucleotide
  modified_base (26)..(26): 5-methyl modified nucleotide
  source: /note="3' tri-ethylene glycol (TEG)"
tccaacaucaaggaagauggcauuucua

SEQ ID NO: 18912 - DNA, 27 bp, Artificial Sequence
  source: /note="Description of Artificial Sequence: Synthetic oligonucleotide"
  source: /note="Description of Combined DNA/RNA Molecule: Synthetic oligonucleotide"
  source: /note="DNA/RNA"
  source: /note="5' tri-ethylene glycol (TEG)"
  modified_base (1)..(1): bicyclic nucleic acid (BNA)
  modified_base (2)..(2): 5-methyl bicyclic nucleic acid
  modified_base (3)..(3): 5-methyl modified nucleotide
  modified_base (6)..(6): 5-methyl modified nucleotide
  modified_base (9)..(9): 5-methyl modified nucleotide
  modified_base (21)..(21): 5-methyl modified nucleotide
  modified_base (26)..(26): 5-methyl modified nucleotide
  source: /note="3' tri-ethylene glycol (TEG)"
tccaacaucaaggaagauggcauuucu

SEQ ID NO: 18913 - DNA, 26 bp, Artificial Sequence
  source: /note="Description of Artificial Sequence: Synthetic oligonucleotide"
  source: /note="Description of Combined DNA/RNA Molecule: Synthetic oligonucleotide"
  source: /note="DNA/RNA"
  source: /note="5' tri-ethylene glycol (TEG)"
  modified_base (1)..(1): bicyclic nucleic acid (BNA)
  modified_base (2)..(2): 5-methyl bicyclic nucleic acid
  modified_base (3)..(3): 5-methyl modified nucleotide
  modified_base (6)..(6): 5-methyl modified nucleotide
  modified_base (9)..(9): 5-methyl modified nucleotide
  modified_base (21)..(21): 5-methyl modified nucleotide
  modified_base (26)..(26): 5-methyl modified nucleotide
  source: /note="3' tri-ethylene glycol (TEG)"
tccaacaucaaggaagauggcauuuc

SEQ ID NO: 18914 - DNA, 25 bp, Artificial Sequence
  source: /note="Description of Artificial Sequence: Synthetic oligonucleotide"
  source: /note="Description of Combined DNA/RNA Molecule: Synthetic oligonucleotide"
  source: /note="DNA/RNA"
  source: /note="5' tri-ethylene glycol (TEG)"
  modified_base (1)..(1): bicyclic nucleic acid (BNA)
  modified_base (2)..(2): 5-methyl bicyclic nucleic acid
  modified_base (3)..(3): 5-methyl modified nucleotide
  modified_base (6)..(6): 5-methyl modified nucleotide
  modified_base (9)..(9): 5-methyl modified nucleotide
  modified_base (21)..(21): 5-methyl modified nucleotide
  source: /note="3' tri-ethylene glycol (TEG)"
tccaacaucaaggaagauggcauuu

SEQ ID NO: 18915 - DNA, 24 bp, Artificial Sequence
  source: /note="Description of Artificial Sequence: Synthetic oligonucleotide"
  source: /note="Description of Combined DNA/RNA Molecule: Synthetic oligonucleotide"
  source: /note="DNA/RNA"
  source: /note="5' tri-ethylene glycol (TEG)"
  modified_base (1)..(1): bicyclic nucleic acid (BNA)
  modified_base (2)..(2): 5-methyl bicyclic nucleic acid
  modified_base (3)..(3): 5-methyl modified nucleotide
  modified_base (6)..(6): 5-methyl modified nucleotide
  modified_base (9)..(9): 5-methyl modified nucleotide
  modified_base (21)..(21): 5-methyl modified nucleotide
  source: /note="3' tri-ethylene glycol (TEG)"
tccaacaucaaggaagauggcauu

SEQ ID NO: 18916 - DNA, 23 bp, Artificial Sequence
  source: /note="Description of Artificial Sequence: Synthetic oligonucleotide"
  source: /note="Description of Combined DNA/RNA Molecule: Synthetic oligonucleotide"
  source: /note="DNA/RNA"
  source: /note="5' tri-ethylene glycol (TEG)"
  modified_base (1)..(1): bicyclic nucleic acid (BNA)
  modified_base (2)..(2): 5-methyl bicyclic nucleic acid
  modified_base (3)..(3): 5-methyl modified nucleotide
  modified_base (6)..(6): 5-methyl modified nucleotide
  modified_base (9)..(9): 5-methyl modified nucleotide
  modified_base (21)..(21): 5-methyl modified nucleotide
  source: /note="3' tri-ethylene glycol (TEG)"
tccaacaucaaggaagauggcau

SEQ ID NO: 18917 - DNA, 22 bp, Artificial Sequence
  source: /note="Description of Artificial Sequence: Synthetic oligonucleotide"
  source: /note="Description of Combined DNA/RNA Molecule: Synthetic oligonucleotide"
  source: /note="DNA/RNA"
  source: /note="5' tri-ethylene glycol (TEG)"
  modified_base (1)..(1): bicyclic nucleic acid (BNA)
  modified_base (2)..(2): 5-methyl bicyclic nucleic acid
  modified_base (3)..(3): 5-methyl modified nucleotide
  modified_base (6)..(6): 5-methyl modified nucleotide
  modified_base (9)..(9): 5-methyl modified nucleotide
  modified_base (21)..(21): 5-methyl modified nucleotide
  source: /note="3' tri-ethylene glycol (TEG)"
tccaacaucaaggaagauggca

SEQ ID NO: 18918 - DNA, 21 bp, Artificial Sequence
  source: /note="Description of Artificial Sequence: Synthetic oligonucleotide"
  source: /note="Description of Combined DNA/RNA Molecule: Synthetic oligonucleotide"
  source: /note="DNA/RNA"
  source: /note="5' tri-ethylene glycol (TEG)"
  modified_base (1)..(1): bicyclic nucleic acid (BNA)
  modified_base (2)..(2): 5-methyl bicyclic nucleic acid
  modified_base (3)..(3): 5-methyl modified nucleotide
  modified_base (6)..(6): 5-methyl modified nucleotide
  modified_base (9)..(9): 5-methyl modified nucleotide
  modified_base (21)..(21): 5-methyl modified nucleotide
  source: /note="3' tri-ethylene glycol (TEG)"
tccaacaucaaggaagauggc

SEQ ID NO: 18919 - DNA, 20 bp, Artificial Sequence
  source: /note="Description of Artificial Sequence: Synthetic oligonucleotide"
  source: /note="Description of Combined DNA/RNA Molecule: Synthetic oligonucleotide"
  source: /note="DNA/RNA"
  source: /note="5' tri-ethylene glycol (TEG)"
  modified_base (1)..(1): bicyclic nucleic acid (BNA)
  modified_base (2)..(2): 5-methyl bicyclic nucleic acid
  modified_base (3)..(3): 5-methyl modified nucleotide
  modified_base (6)..(6): 5-methyl modified nucleotide
  modified_base (9)..(9): 5-methyl modified nucleotide
  source: /note="3' tri-ethylene glycol (TEG)"
tccaacaucaaggaagaugg

SEQ ID NO: 18920 - DNA, 19 bp, Artificial Sequence
  source: /note="Description of Artificial Sequence: Synthetic oligonucleotide"
  source: /note="Description of Combined DNA/RNA Molecule: Synthetic oligonucleotide"
  source: /note="DNA/RNA"
  source: /note="5' tri-ethylene glycol (TEG)"
  modified_base (1)..(1): bicyclic nucleic acid (BNA)
  modified_base (2)..(2): 5-methyl bicyclic nucleic acid
  modified_base (3)..(3): 5-methyl modified nucleotide
  modified_base (6)..(6): 5-methyl modified nucleotide
  modified_base (9)..(9): 5-methyl modified nucleotide
  source: /note="3' tri-ethylene glycol (TEG)"
tccaacaucaaggaagaug

SEQ ID NO: 18921 - DNA, 18 bp, Artificial Sequence
  source: /note="Description of Artificial Sequence: Synthetic oligonucleotide"
  source: /note="Description of Combined DNA/RNA Molecule: Synthetic oligonucleotide"
  source: /note="DNA/RNA"
  source: /note="5' tri-ethylene glycol (TEG)"
  modified_base (1)..(1): bicyclic nucleic acid (BNA)
  modified_base (2)..(2): 5-methyl bicyclic nucleic acid
  modified_base (3)..(3): 5-methyl modified nucleotide
  modified_base (6)..(6): 5-methyl modified nucleotide
  modified_base (9)..(9): 5-methyl modified nucleotide
  source: /note="3' tri-ethylene glycol (TEG)"
tccaacaucaaggaagau

SEQ ID NO: 18922 - DNA, 17 bp, Artificial Sequence
  source: /note="Description of Artificial Sequence: Synthetic oligonucleotide"
  source: /note="Description of Combined DNA/RNA Molecule: Synthetic oligonucleotide"
  source: /note="DNA/RNA"
  source: /note="5' tri-ethylene glycol (TEG)"
  modified_base (1)..(1): bicyclic nucleic acid (BNA)
  modified_base (2)..(2): 5-methyl bicyclic nucleic acid
  modified_base (3)..(3): 5-methyl modified nucleotide
  modified_base (6)..(6): 5-methyl modified nucleotide
  modified_base (9)..(9): 5-methyl modified nucleotide
  source: /note="3' tri-ethylene glycol (TEG)"
tccaacaucaaggaaga

SEQ ID NO: 18923 - DNA, 16 bp, Artificial Sequence
  source: /note="Description of Artificial Sequence: Synthetic oligonucleotide"
  source: /note="Description of Combined DNA/RNA Molecule: Synthetic oligonucleotide"
  source: /note="DNA/RNA"
  source: /note="5' tri-ethylene glycol (TEG)"
  modified_base (1)..(1): bicyclic nucleic acid (BNA)
  modified_base (2)..(2): 5-methyl bicyclic nucleic acid
  modified_base (3)..(3): 5-methyl modified nucleotide
  modified_base (6)..(6): 5-methyl modified nucleotide
  modified_base (9)..(9): 5-methyl modified nucleotide
  source: /note="3' tri-ethylene glycol (TEG)"
tccaacaucaaggaag

SEQ ID NO: 18924 - RNA, 28 nt, Artificial Sequence
  source: /note="Description of Artificial Sequence: Synthetic oligonucleotide"
  source: /note="RNA"
  source: /note="5' tri-ethylene glycol (TEG)"
  modified_base (1)..(1): 5-methyl bicyclic nucleic acid
  modified_base (2)..(2): 5-methyl bicyclic nucleic acid
  modified_base (5)..(5): 5-methyl modified nucleotide
  modified_base (8)..(8): 5-methyl modified nucleotide
  modified_base (20)..(20): 5-methyl modified nucleotide
  modified_base (25)..(25): 5-methyl modified nucleotide
  source: /note="3' tri-ethylene glycol (TEG)"
ccaacaucaaggaagauggcauuucuag

SEQ ID NO: 18925 - RNA, 27 nt, Artificial Sequence
  source: /note="Description of Artificial Sequence: Synthetic oligonucleotide"
  source: /note="RNA"
  source: /note="5' tri-ethylene glycol (TEG)"
  modified_base (1)..(1): 5-methyl bicyclic nucleic acid
  modified_base (2)..(2): 5-methyl bicyclic nucleic acid
  modified_base (5)..(5): 5-methyl modified nucleotide
  modified_base (8)..(8): 5-methyl modified nucleotide
  modified_base (20)..(20): 5-methyl modified nucleotide
  modified_base (25)..(25): 5-methyl modified nucleotide
  source: /note="3' tri-ethylene glycol (TEG)"
ccaacaucaaggaagauggcauuucua

SEQ ID NO: 18926 - RNA, 26 nt, Artificial Sequence
  source: /note="Description of Artificial Sequence: Synthetic oligonucleotide"
  source: /note="RNA"
  source: /note="5' tri-ethylene glycol (TEG)"
  modified_base (1)..(1): 5-methyl bicyclic nucleic acid
  modified_base (2)..(2): 5-methyl bicyclic nucleic acid
  modified_base (5)..(5): 5-methyl modified nucleotide
  modified_base (8)..(8): 5-methyl modified nucleotide
  modified_base (20)..(20): 5-methyl modified nucleotide
  modified_base (25)..(25): 5-methyl modified nucleotide
  source: /note="3' tri-ethylene glycol (TEG)"
ccaacaucaaggaagauggcauuucu

SEQ ID NO: 18927 - RNA, 25 nt, Artificial Sequence
  source: /note="Description of Artificial Sequence: Synthetic oligonucleotide"
  source: /note="RNA"
  source: /note="5' tri-ethylene glycol (TEG)"
  modified_base (1)..(1): 5-methyl bicyclic nucleic acid
  modified_base (2)..(2): 5-methyl bicyclic nucleic acid
  modified_base (5)..(5): 5-methyl modified nucleotide
  modified_base (8)..(8): 5-methyl modified nucleotide
  modified_base (20)..(20): 5-methyl modified nucleotide
  modified_base (25)..(25): 5-methyl modified nucleotide
  source: /note="3' tri-ethylene glycol (TEG)"
ccaacaucaaggaagauggcauuuc

SEQ ID NO: 18928 - RNA, 24 nt, Artificial Sequence
  source: /note="Description of Artificial Sequence: Synthetic oligonucleotide"
  source: /note="RNA"
  source: /note="5' tri-ethylene glycol (TEG)"
  modified_base (1)..(1): 5-methyl bicyclic nucleic acid
  modified_base (2)..(2): 5-methyl bicyclic nucleic acid
  modified_base (5)..(5): 5-methyl modified nucleotide
  modified_base (8)..(8): 5-methyl modified nucleotide
  modified_base (20)..(20): 5-methyl modified nucleotide
  source: /note="3' tri-ethylene glycol (TEG)"
ccaacaucaaggaagauggcauuu

SEQ ID NO: 18929 - RNA, 23 nt, Artificial Sequence
  source: /note="Description of Artificial Sequence: Synthetic oligonucleotide"
  source: /note="RNA"
  source: /note="5' tri-ethylene glycol (TEG)"
  modified_base (1)..(1): 5-methyl bicyclic nucleic acid
  modified_base (2)..(2): 5-methyl bicyclic nucleic acid
  modified_base (5)..(5): 5-methyl modified nucleotide
  modified_base (8)..(8): 5-methyl modified nucleotide
  modified_base (20)..(20): 5-methyl modified nucleotide
  source: /note="3' tri-ethylene glycol (TEG)"
ccaacaucaaggaagauggcauu

SEQ ID NO: 18930 - RNA, 22 nt, Artificial Sequence
  source: /note="Description of Artificial Sequence: Synthetic oligonucleotide"
  source: /note="RNA"
  source: /note="5' tri-ethylene glycol (TEG)"
  modified_base (1)..(1): 5-methyl bicyclic nucleic acid
  modified_base (2)..(2): 5-methyl bicyclic nucleic acid
  modified_base (5)..(5): 5-methyl modified nucleotide
  modified_base (8)..(8): 5-methyl modified nucleotide
  modified_base (20)..(20): 5-methyl modified nucleotide
  source: /note="3' tri-ethylene glycol (TEG)"
ccaacaucaaggaagauggcau

SEQ ID NO: 18931 - RNA, 21 nt, Artificial Sequence
  source: /note="Description of Artificial Sequence: Synthetic oligonucleotide"
  source: /note="RNA"
  source: /note="5' tri-ethylene glycol (TEG)"
  modified_base (1)..(1): 5-methyl bicyclic nucleic acid
  modified_base (2)..(2): 5-methyl bicyclic nucleic acid
  modified_base (5)..(5): 5-methyl modified nucleotide
  modified_base (8)..(8): 5-methyl modified nucleotide
  modified_base (20)..(20): 5-methyl modified nucleotide
  source: /note="3' tri-ethylene glycol (TEG)"
ccaacaucaaggaagauggca

SEQ ID NO: 18932 - RNA, 20 nt, Artificial Sequence
  source: /note="Description of Artificial Sequence: Synthetic oligonucleotide"
  source: /note="RNA"
  source: /note="5' tri-ethylene glycol (TEG)"
  modified_base (1)..(1): 5-methyl bicyclic nucleic acid
  modified_base (2)..(2): 5-methyl bicyclic nucleic acid
  modified_base (5)..(5): 5-methyl modified nucleotide
  modified_base (8)..(8): 5-methyl modified nucleotide
  modified_base (20)..(20): 5-methyl modified nucleotide
  source: /note="3' tri-ethylene glycol (TEG)"
ccaacaucaaggaagauggc

SEQ ID NO: 18933 - RNA, 19 nt, Artificial Sequence
  source: /note="Description of Artificial Sequence: Synthetic oligonucleotide"
  source: /note="RNA"
  source: /note="5' tri-ethylene glycol (TEG)"
  modified_base (1)..(1): 5-methyl bicyclic nucleic acid
  modified_base (2)..(2): 5-methyl bicyclic nucleic acid
  modified_base (5)..(5): 5-methyl modified nucleotide
  modified_base (8)..(8): 5-methyl modified nucleotide
  source: /note="3' tri-ethylene glycol (TEG)"
ccaacaucaaggaagaugg

SEQ ID NO: 18934 - RNA, 18 nt, Artificial Sequence
  source: /note="Description of Artificial Sequence: Synthetic oligonucleotide"
  source: /note="RNA"
  source: /note="5' tri-ethylene glycol (TEG)"
  modified_base (1)..(1): 5-methyl bicyclic nucleic acid
  modified_base (2)..(2): 5-methyl bicyclic nucleic acid
  modified_base (5)..(5): 5-methyl modified nucleotide
  modified_base (8)..(8): 5-methyl modified nucleotide
  source: /note="3' tri-ethylene glycol (TEG)"
ccaacaucaaggaagaug

SEQ ID NO: 18935 - RNA, 17 nt, Artificial Sequence
  source: /note="Description of Artificial Sequence: Synthetic oligonucleotide"
  source: /note="RNA"
  source: /note="5' tri-ethylene glycol (TEG)"
  modified_base (1)..(1): 5-methyl bicyclic nucleic acid
  modified_base (2)..(2): 5-methyl bicyclic nucleic acid
  modified_base (5)..(5): 5-methyl modified nucleotide
  modified_base (8)..(8): 5-methyl modified nucleotide
  source: /note="3' tri-ethylene glycol (TEG)"
ccaacaucaaggaagau

SEQ ID NO: 18936 - RNA, 16 nt, Artificial Sequence
  source: /note="Description of Artificial Sequence: Synthetic oligonucleotide"
  source: /note="RNA"
  source: /note="5' tri-ethylene glycol (TEG)"
  modified_base (1)..(1): 5-methyl bicyclic nucleic acid
  modified_base (2)..(2): 5-methyl bicyclic nucleic acid
  modified_base (5)..(5): 5-methyl modified nucleotide
  modified_base (8)..(8): 5-methyl modified nucleotide
  source: /note="3' tri-ethylene glycol (TEG)"
ccaacaucaaggaaga

SEQ ID NO: 18937 - RNA, 15 nt, Artificial Sequence
  source: /note="Description of Artificial Sequence: Synthetic oligonucleotide"
  source: /note="RNA"
  source: /note="5' tri-ethylene glycol (TEG)"
  modified_base (1)..(1): 5-methyl bicyclic nucleic acid
  modified_base (2)..(2): 5-methyl bicyclic nucleic acid
  modified_base (5)..(5): 5-methyl modified nucleotide
  modified_base (8)..(8): 5-methyl modified nucleotide
  source: /note="3' tri-ethylene glycol (TEG)"
ccaacaucaaggaag

SEQ ID NO: 18938 - RNA, 27 nt, Artificial Sequence
  source: /note="Description of Artificial Sequence: Synthetic oligonucleotide"
  source: /note="RNA"
  source: /note="5' tri-ethylene glycol (TEG)"
  modified_base (1)..(1): 5-methyl bicyclic nucleic acid
  modified_base (2)..(2): bicyclic nucleic acid (BNA)
  modified_base (4)..(4): 5-methyl modified nucleotide
  modified_base (7)..(7): 5-methyl modified nucleotide
  modified_base (19)..(19): 5-methyl modified nucleotide
  modified_base (24)..(24): 5-methyl modified nucleotide
  source: /note="3' tri-ethylene glycol (TEG)"
caacaucaaggaagauggcauuucuag

SEQ ID NO: 18939 - RNA, 26 nt, Artificial Sequence
  source: /note="Description of Artificial Sequence: Synthetic oligonucleotide"
  source: /note="RNA"
  source: /note="5' tri-ethylene glycol (TEG)"
  modified_base (1)..(1): 5-methyl bicyclic nucleic acid
  modified_base (2)..(2): bicyclic nucleic acid (BNA)
  modified_base (4)..(4): 5-methyl modified nucleotide
  modified_base (7)..(7): 5-methyl modified nucleotide
  modified_base (19)..(19): 5-methyl modified nucleotide
  modified_base (24)..(24): 5-methyl modified nucleotide
  source: /note="3' tri-ethylene glycol (TEG)"
caacaucaaggaagauggcauuucua

SEQ ID NO: 18940 - RNA, 25 nt, Artificial Sequence
  source: /note="Description of Artificial Sequence: Synthetic oligonucleotide"
  source: /note="RNA"
  source: /note="5' tri-ethylene glycol (TEG)"
  modified_base (1)..(1): 5-methyl bicyclic nucleic acid
  modified_base (2)..(2): bicyclic nucleic acid (BNA)
  modified_base (4)..(4): 5-methyl modified nucleotide
  modified_base (7)..(7): 5-methyl modified nucleotide
  modified_base (19)..(19): 5-methyl modified nucleotide
  modified_base (24)..(24): 5-methyl modified nucleotide
  source: /note="3' tri-ethylene glycol (TEG)"
caacaucaaggaagauggcauuucu

SEQ ID NO: 18941 - RNA, 24 nt, Artificial Sequence
  source: /note="Description of Artificial Sequence: Synthetic oligonucleotide"
  source: /note="RNA"
  source: /note="5' tri-ethylene glycol (TEG)"
  modified_base (1)..(1): 5-methyl bicyclic nucleic acid
  modified_base (2)..(2): bicyclic nucleic acid (BNA)
  modified_base (4)..(4): 5-methyl modified nucleotide
  modified_base (7)..(7): 5-methyl modified nucleotide
  modified_base (19)..(19): 5-methyl modified nucleotide
  modified_base (24)..(24): 5-methyl modified nucleotide
  source: /note="3' tri-ethylene glycol (TEG)"
caacaucaaggaagauggcauuuc

SEQ ID NO: 18942 - RNA, 23 nt, Artificial Sequence
  source: /note="Description of Artificial Sequence: Synthetic oligonucleotide"
  source: /note="RNA"
  source: /note="5' tri-ethylene glycol (TEG)"
  modified_base (1)..(1): 5-methyl bicyclic nucleic acid
  modified_base (2)..(2): bicyclic nucleic acid (BNA)
  modified_base (4)..(4): 5-methyl modified nucleotide
  modified_base (7)..(7): 5-methyl modified nucleotide
  modified_base (19)..(19): 5-methyl modified nucleotide
  source: /note="3' tri-ethylene glycol (TEG)"
caacaucaaggaagauggcauuu

SEQ ID NO: 18943 - RNA, 22 nt, Artificial Sequence
  source: /note="Description of Artificial Sequence: Synthetic oligonucleotide"
  source: /note="RNA"
  source: /note="5' tri-ethylene glycol (TEG)"
  modified_base (1)..(1): 5-methyl bicyclic nucleic acid
  modified_base (2)..(2): bicyclic nucleic acid (BNA)
  modified_base (4)..(4): 5-methyl modified nucleotide
  modified_base (7)..(7): 5-methyl modified nucleotide
  modified_base (19)..(19): 5-methyl modified nucleotide
  source: /note="3' tri-ethylene glycol (TEG)"
caacaucaaggaagauggcauu

SEQ ID NO: 18944 - RNA, 21 nt, Artificial Sequence
  source: /note="Description of Artificial Sequence: Synthetic oligonucleotide"
  source: /note="RNA"
  source: /note="5' tri-ethylene glycol (TEG)"
  modified_base (1)..(1): 5-methyl bicyclic nucleic acid
  modified_base (2)..(2): bicyclic nucleic acid (BNA)
  modified_base (4)..(4): 5-methyl modified nucleotide
  modified_base (7)..(7): 5-methyl modified nucleotide
  modified_base (19)..(19): 5-methyl modified nucleotide
  source: /note="3' tri-ethylene glycol (TEG)"
caacaucaaggaagauggcau

SEQ ID NO: 18945 - RNA, 20 nt, Artificial Sequence
  source: /note="Description of Artificial Sequence: Synthetic oligonucleotide"
  source: /note="RNA"
  source: /note="5' tri-ethylene glycol (TEG)"
  modified_base (1)..(1): 5-methyl bicyclic nucleic acid
  modified_base (2)..(2): bicyclic nucleic acid (BNA)
  modified_base (4)..(4): 5-methyl modified nucleotide
  modified_base (7)..(7): 5-methyl modified nucleotide
  modified_base (19)..(19): 5-methyl modified nucleotide
  source: /note="3' tri-ethylene glycol (TEG)"
caacaucaaggaagauggca

SEQ ID NO: 18946 - RNA, 19 nt, Artificial Sequence
  source: /note="Description of Artificial Sequence: Synthetic oligonucleotide"
  source: /note="RNA"
  source: /note="5' tri-ethylene glycol (TEG)"
  modified_base (1)..(1): 5-methyl bicyclic nucleic acid
  modified_base (2)..(2): bicyclic nucleic acid (BNA)
  modified_base (4)..(4): 5-methyl modified nucleotide
  modified_base (7)..(7): 5-methyl modified nucleotide
  modified_base (19)..(19): 5-methyl modified nucleotide
  source: /note="3' tri-ethylene glycol (TEG)"
caacaucaaggaagauggc

SEQ ID NO: 18947 - RNA, 18 nt, Artificial Sequence
  source: /note="Description of Artificial Sequence: Synthetic oligonucleotide"
  source: /note="RNA"
  source: /note="5' tri-ethylene glycol (TEG)"
  modified_base (1)..(1): 5-methyl bicyclic nucleic acid
  modified_base (2)..(2): bicyclic nucleic acid (BNA)
  modified_base (4)..(4): 5-methyl modified nucleotide
  modified_base (7)..(7): 5-methyl modified nucleotide
  source: /note="3' tri-ethylene glycol (TEG)"
caacaucaaggaagaugg

SEQ ID NO: 18948 - RNA, 17 nt, Artificial Sequence
  source: /note="Description of Artificial Sequence: Synthetic oligonucleotide"
  source: /note="RNA"
  source: /note="5' tri-ethylene glycol (TEG)"
  modified_base (1)..(1): 5-methyl bicyclic nucleic acid
  modified_base (2)..(2): bicyclic nucleic acid (BNA)
  modified_base (4)..(4): 5-methyl modified nucleotide
  modified_base (7)..(7): 5-methyl modified nucleotide
  source: /note="3' tri-ethylene glycol (TEG)"
caacaucaaggaagaug

SEQ ID NO: 18949 - RNA, 16 nt, Artificial Sequence
  source: /note="Description of Artificial Sequence: Synthetic oligonucleotide"
  source: /note="RNA"
  source: /note="5' tri-ethylene glycol (TEG)"
  modified_base (1)..(1): 5-methyl bicyclic nucleic acid
  modified_base (2)..(2): bicyclic nucleic acid (BNA)
  modified_base (4)..(4): 5-methyl modified nucleotide
  modified_base (7)..(7): 5-methyl modified nucleotide
  source: /note="3' tri-ethylene glycol (TEG)"
caacaucaaggaagau

SEQ ID NO: 18950 - RNA, 15 nt, Artificial Sequence
  source: /note="Description of Artificial Sequence: Synthetic oligonucleotide"
  source: /note="RNA"
  source: /note="5' tri-ethylene glycol (TEG)"
  modified_base (1)..(1): 5-methyl bicyclic nucleic acid
  modified_base (2)..(2): bicyclic nucleic acid (BNA)
  modified_base (4)..(4): 5-methyl modified nucleotide
  modified_base (7)..(7): 5-methyl modified nucleotide
  source: /note="3' tri-ethylene glycol (TEG)"
caacaucaaggaaga

SEQ ID NO: 18951 - RNA, 14 nt, Artificial Sequence
  source: /note="Description of Artificial Sequence: Synthetic oligonucleotide"
  source: /note="RNA"
  source: /note="5' tri-ethylene glycol (TEG)"
  modified_base (1)..(1): 5-methyl bicyclic nucleic acid
  modified_base (2)..(2): bicyclic nucleic acid (BNA)
  modified_base (4)..(4): 5-methyl modified nucleotide
  modified_base (7)..(7): 5-methyl modified nucleotide
  source: /note="3' tri-ethylene glycol (TEG)"
caacaucaaggaag

SEQ ID NO: 18952 - RNA, 26 nt, Artificial Sequence
  source: /note="Description of Artificial Sequence: Synthetic oligonucleotide"
  source: /note="RNA"
  source: /note="5' tri-ethylene glycol (TEG)"
  modified_base (1)..(1): bicyclic nucleic acid (BNA)
  modified_base (2)..(2): bicyclic nucleic acid (BNA)
  modified_base (3)..(3): 5-methyl modified nucleotide
  modified_base (6)..(6): 5-methyl modified nucleotide
  modified_base (18)..(18): 5-methyl modified nucleotide
  modified_base (23)..(23): 5-methyl modified nucleotide
  source: /note="3' tri-ethylene glycol (TEG)"
aacaucaaggaagauggcauuucuag

SEQ ID NO: 18953 - RNA, 25 nt, Artificial Sequence
  source: /note="Description of Artificial Sequence: Synthetic oligonucleotide"
  source: /note="RNA"
  source: /note="5' tri-ethylene glycol (TEG)"
  modified_base (1)..(1): bicyclic nucleic acid (BNA)
  modified_base (2)..(2): bicyclic nucleic acid (BNA)
  modified_base (3)..(3): 5-methyl modified nucleotide
  modified_base (6)..(6): 5-methyl modified nucleotide
  modified_base (18)..(18): 5-methyl modified nucleotide
  modified_base (23)..(23): 5-methyl modified nucleotide
  source: /note="3' tri-ethylene glycol (TEG)"
aacaucaaggaagauggcauuucua

SEQ ID NO: 18954 - RNA, 24 nt, Artificial Sequence
  source: /note="Description of Artificial Sequence: Synthetic oligonucleotide"
  source: /note="RNA"
  source: /note="5' tri-ethylene glycol (TEG)"
  modified_base (1)..(1): bicyclic nucleic acid (BNA)
  modified_base (2)..(2): bicyclic nucleic acid (BNA)
  modified_base (3)..(3): 5-methyl modified nucleotide
  modified_base (6)..(6): 5-methyl modified nucleotide
  modified_base (18)..(18): 5-methyl modified nucleotide
  modified_base (23)..(23): 5-methyl modified nucleotide
  source: /note="3' tri-ethylene glycol (TEG)"
aacaucaaggaagauggcauuucu

SEQ ID NO: 18955 - RNA, 23 nt, Artificial Sequence
  source: /note="Description of Artificial Sequence: Synthetic oligonucleotide"
  source: /note="RNA"
  source: /note="5' tri-ethylene glycol (TEG)"
  modified_base (1)..(1): bicyclic nucleic acid (BNA)
  modified_base (2)..(2): bicyclic nucleic acid (BNA)
  modified_base (3)..(3): 5-methyl modified nucleotide
  modified_base (6)..(6): 5-methyl modified nucleotide
  modified_base (18)..(18): 5-methyl modified nucleotide
  modified_base (23)..(23): 5-methyl modified nucleotide
  source: /note="3' tri-ethylene glycol (TEG)"
aacaucaaggaagauggcauuuc

SEQ ID NO: 18956 - RNA, 22 nt, Artificial Sequence
  source: /note="Description of Artificial Sequence: Synthetic oligonucleotide"
  source: /note="RNA"
  source: /note="5' tri-ethylene glycol (TEG)"
  modified_base (1)..(1): bicyclic nucleic acid (BNA)
  modified_base (2)..(2): bicyclic nucleic acid (BNA)
  modified_base (3)..(3): 5-methyl modified nucleotide
  modified_base (6)..(6): 5-methyl modified nucleotide
  modified_base (18)..(18): 5-methyl modified nucleotide
  source: /note="3' tri-ethylene glycol (TEG)"
aacaucaaggaagauggcauuu

SEQ ID NO: 18957 - RNA, 21 nt, Artificial Sequence
  source: /note="Description of Artificial Sequence: Synthetic oligonucleotide"
  source: /note="RNA"
  source: /note="5' tri-ethylene glycol (TEG)"
  modified_base (1)..(1): bicyclic nucleic acid (BNA)
  modified_base (2)..(2): bicyclic nucleic acid (BNA)
  modified_base (3)..(3): 5-methyl modified nucleotide
  modified_base (6)..(6): 5-methyl modified nucleotide
  modified_base (18)..(18): 5-methyl modified nucleotide
  source: /note="3' tri-ethylene glycol (TEG)"
aacaucaaggaagauggcauu

SEQ ID NO: 18958 - RNA, 20 nt, Artificial Sequence
  source: /note="Description of Artificial Sequence: Synthetic oligonucleotide"
  source: /note="RNA"
  source: /note="5' tri-ethylene glycol (TEG)"
  modified_base (1)..(1): bicyclic nucleic acid (BNA)
  modified_base (2)..(2): bicyclic nucleic acid (BNA)
  modified_base (3)..(3): 5-methyl modified nucleotide
  modified_base (6)..(6): 5-methyl modified nucleotide
  modified_base (18)..(18): 5-methyl modified nucleotide
  source: /note="3' tri-ethylene glycol (TEG)"
aacaucaaggaagauggcau

SEQ ID NO: 18959 - RNA, 19 nt, Artificial Sequence
  source: /note="Description of Artificial Sequence: Synthetic oligonucleotide"
  source: /note="RNA"
  source: /note="5' tri-ethylene glycol (TEG)"
  modified_base (1)..(1): bicyclic nucleic acid (BNA)
  modified_base (2)..(2): bicyclic nucleic acid (BNA)
  modified_base (3)..(3): 5-methyl modified nucleotide
  modified_base (6)..(6): 5-methyl modified nucleotide
  modified_base (18)..(18): 5-methyl modified nucleotide
  source: /note="3' tri-ethylene glycol (TEG)"
aacaucaaggaagauggca

SEQ ID NO: 18960 - RNA, 18 nt, Artificial Sequence
  source: /note="Description of Artificial Sequence: Synthetic oligonucleotide"
  source: /note="RNA"
  source: /note="5' tri-ethylene glycol (TEG)"
  modified_base (1)..(1): bicyclic nucleic acid (BNA)
  modified_base (2)..(2): bicyclic nucleic acid (BNA)
  modified_base (3)..(3): 5-methyl modified nucleotide
  modified_base (6)..(6): 5-methyl modified nucleotide
  modified_base (18)..(18): 5-methyl modified nucleotide
  source: /note="3' tri-ethylene glycol (TEG)"
aacaucaaggaagauggc

SEQ ID NO: 18961 - RNA, 17 nt, Artificial Sequence
  source: /note="Description of Artificial Sequence: Synthetic oligonucleotide"
  source: /note="RNA"
  source: /note="5' tri-ethylene glycol (TEG)"
  modified_base (1)..(1): bicyclic nucleic acid (BNA)
  modified_base (2)..(2): bicyclic nucleic acid (BNA)
  modified_base (3)..(3): 5-methyl modified nucleotide
  modified_base (6)..(6): 5-methyl modified nucleotide
  source: /note="3' tri-ethylene glycol (TEG)"
aacaucaaggaagaugg

SEQ ID NO: 18962 - RNA, 16 nt, Artificial Sequence
  source: /note="Description of Artificial Sequence: Synthetic oligonucleotide"
  source: /note="RNA"
  source: /note="5' tri-ethylene glycol (TEG)"
  modified_base (1)..(1): bicyclic nucleic acid (BNA)
  modified_base (2)..(2): bicyclic nucleic acid (BNA)
  modified_base (3)..(3): 5-methyl modified nucleotide
  modified_base (6)..(6): 5-methyl modified nucleotide
  source: /note="3' tri-ethylene glycol (TEG)"
aacaucaaggaagaug

SEQ ID NO: 18963 - RNA, 15 nt, Artificial Sequence
  source: /note="Description of Artificial Sequence: Synthetic oligonucleotide"
  source: /note="RNA"
  source: /note="5' tri-ethylene glycol (TEG)"
  modified_base (1)..(1): bicyclic nucleic acid (BNA)
  modified_base (2)..(2): bicyclic nucleic acid (BNA)
  modified_base (3)..(3): 5-methyl modified nucleotide
  modified_base (6)..(6): 5-methyl modified nucleotide
  source: /note="3' tri-ethylene glycol (TEG)"
aacaucaaggaagau

SEQ ID NO: 18964 - RNA, 14 nt, Artificial Sequence
  source: /note="Description of Artificial Sequence: Synthetic oligonucleotide"
  source: /note="RNA"
  source: /note="5' tri-ethylene glycol (TEG)"
  modified_base (1)..(1): bicyclic nucleic acid (BNA)
  modified_base (2)..(2): bicyclic nucleic acid (BNA)
  modified_base (3)..(3): 5-methyl modified nucleotide
  modified_base (6)..(6): 5-methyl modified nucleotide
  source: /note="3' tri-ethylene glycol (TEG)"
aacaucaaggaaga

SEQ ID NO: 18965 - RNA, 13 nt, Artificial Sequence
  source: /note="Description of Artificial Sequence: Synthetic oligonucleotide"
  source: /note="RNA"
  source: /note="5' tri-ethylene glycol (TEG)"
  modified_base (1)..(1): bicyclic nucleic acid (BNA)
  modified_base (2)..(2): bicyclic nucleic acid (BNA)
  modified_base (3)..(3): 5-methyl modified nucleotide
  modified_base (6)..(6): 5-methyl modified nucleotide
  source: /note="3' tri-ethylene glycol (TEG)"
aacaucaaggaag

SEQ ID NO: 18966 - RNA, 25 nt, Artificial Sequence
  source: /note="Description of Artificial Sequence: Synthetic oligonucleotide"
  source: /note="RNA"
  source: /note="5' tri-ethylene glycol (TEG)"
  modified_base (1)..(1): bicyclic nucleic acid (BNA)
  modified_base (2)..(2): 5-methyl bicyclic nucleic acid
  modified_base (5)..(5): 5-methyl modified nucleotide
  modified_base (17)..(17): 5-methyl modified nucleotide
  modified_base (22)..(22): 5-methyl modified nucleotide
  source: /note="3' tri-ethylene glycol (TEG)"
acaucaaggaagauggcauuucuag

SEQ ID NO: 18967 - RNA, 24 nt, Artificial Sequence
  source: /note="Description of Artificial Sequence: Synthetic oligonucleotide"
  source: /note="RNA"
  source: /note="5' tri-ethylene glycol (TEG)"
  modified_base (1)..(1): bicyclic nucleic acid (BNA)
  modified_base (2)..(2): 5-methyl bicyclic nucleic acid
  modified_base (5)..(5): 5-methyl modified nucleotide
  modified_base (17)..(17): 5-methyl modified nucleotide
  modified_base (22)..(22): 5-methyl modified nucleotide
  source: /note="3' tri-ethylene glycol (TEG)"
acaucaaggaagauggcauuucua

SEQ ID NO: 18968 - RNA, 23 nt, Artificial Sequence
  source: /note="Description of Artificial Sequence: Synthetic oligonucleotide"
  source: /note="RNA"
  source: /note="5' tri-ethylene glycol (TEG)"
  modified_base (1)..(1): bicyclic nucleic acid (BNA)
  modified_base (2)..(2): 5-methyl bicyclic nucleic acid
  modified_base (5)..(5): 5-methyl modified nucleotide
  modified_base (17)..(17): 5-methyl modified nucleotide
  modified_base (22)..(22): 5-methyl modified nucleotide
  source: /note="3' tri-ethylene glycol (TEG)"
acaucaaggaagauggcauuucu

SEQ ID NO: 18969 - RNA, 22 nt, Artificial Sequence
  source: /note="Description of Artificial Sequence: Synthetic oligonucleotide"
  source: /note="RNA"
  source: /note="5' tri-ethylene glycol (TEG)"
  modified_base (1)..(1): bicyclic nucleic acid (BNA)
  modified_base (2)..(2): 5-methyl bicyclic nucleic acid
  modified_base (5)..(5): 5-methyl modified nucleotide
  modified_base (17)..(17): 5-methyl modified nucleotide
  modified_base (22)..(22): 5-methyl modified nucleotide
  source: /note="3' tri-ethylene glycol (TEG)"
acaucaaggaagauggcauuuc

SEQ ID NO: 18970 - RNA, 21 nt, Artificial Sequence
  source: /note="Description of Artificial Sequence: Synthetic oligonucleotide"
  source: /note="RNA"
  source: /note="5' tri-ethylene glycol (TEG)"
  modified_base (1)..(1): bicyclic nucleic acid (BNA)
  modified_base (2)..(2): 5-methyl bicyclic nucleic acid
  modified_base (5)..(5): 5-methyl modified nucleotide
  modified_base (17)..(17): 5-methyl modified nucleotide
  source: /note="3' tri-ethylene glycol (TEG)"
acaucaaggaagauggcauuu

SEQ ID NO: 18971 - RNA, 20 nt, Artificial Sequence
  source: /note="Description of Artificial Sequence: Synthetic oligonucleotide"
  source: /note="RNA"
  source: /note="5' tri-ethylene glycol (TEG)"
  modified_base (1)..(1): bicyclic nucleic acid (BNA)
  modified_base (2)..(2): 5-methyl bicyclic nucleic acid
  modified_base (5)..(5): 5-methyl modified nucleotide
  modified_base (17)..(17): 5-methyl modified nucleotide
  source: /note="3' tri-ethylene glycol (TEG)"
acaucaaggaagauggcauu

SEQ ID NO: 18972 - RNA, 19 nt, Artificial Sequence
  source: /note="Description of Artificial Sequence: Synthetic oligonucleotide"
  source: /note="RNA"
  source: /note="5' tri-ethylene glycol (TEG)"
  modified_base (1)..(1): bicyclic nucleic acid (BNA)
  modified_base (2)..(2): 5-methyl bicyclic nucleic acid
  modified_base (5)..(5): 5-methyl modified nucleotide
  modified_base (17)..(17): 5-methyl modified nucleotide
  source: /note="3' tri-ethylene glycol (TEG)"
acaucaaggaagauggcau

SEQ ID NO: 18973 - RNA, 18 nt, Artificial Sequence
  source: /note="Description of Artificial Sequence: Synthetic oligonucleotide"
  source: /note="RNA"
  source: /note="5' tri-ethylene glycol (TEG)"
  modified_base (1)..(1): bicyclic nucleic acid (BNA)
  modified_base (2)..(2): 5-methyl bicyclic nucleic acid
  modified_base (5)..(5): 5-methyl modified nucleotide
  modified_base (17)..(17): 5-methyl modified nucleotide
  source: /note="3' tri-ethylene glycol (TEG)"
acaucaaggaagauggca

SEQ ID NO: 18974 - RNA, 17 nt, Artificial Sequence
  source: /note="Description of Artificial Sequence: Synthetic oligonucleotide"
  source: /note="RNA"
  source: /note="5' tri-ethylene glycol (TEG)"
  modified_base (1)..(1): bicyclic nucleic acid (BNA)
  modified_base (2)..(2): 5-methyl bicyclic nucleic acid
  modified_base (5)..(5): 5-methyl modified nucleotide
  modified_base (17)..(17): 5-methyl modified nucleotide
  source: /note="3' tri-ethylene glycol (TEG)"
acaucaaggaagauggc

SEQ ID NO: 18975 - RNA, 16 nt, Artificial Sequence
  source: /note="Description of Artificial Sequence: Synthetic oligonucleotide"
  source: /note="RNA"
  source: /note="5' tri-ethylene glycol (TEG)"
  modified_base (1)..(1): bicyclic nucleic acid (BNA)
  modified_base (2)..(2): 5-methyl bicyclic nucleic acid
  modified_base (5)..(5): 5-methyl modified nucleotide
  source: /note="3' tri-ethylene glycol (TEG)"
acaucaaggaagaugg

SEQ ID NO: 18976 - RNA, 15 nt, Artificial Sequence
  source: /note="Description of Artificial Sequence: Synthetic oligonucleotide"
  source: /note="RNA"
  source: /note="5' tri-ethylene glycol (TEG)"
  modified_base (1)..(1): bicyclic nucleic acid (BNA)
  modified_base (2)..(2): 5-methyl bicyclic nucleic acid
  modified_base (5)..(5): 5-methyl modified nucleotide
  source: /note="3' tri-ethylene glycol (TEG)"
acaucaaggaagaug

SEQ ID NO: 18977 - RNA, 14 nt, Artificial Sequence
  source: /note="Description of Artificial Sequence: Synthetic oligonucleotide"
  source: /note="RNA"
  source: /note="5' tri-ethylene glycol (TEG)"
  modified_base (1)..(1): bicyclic nucleic acid (BNA)
  modified_base (2)..(2): 5-methyl bicyclic nucleic acid
  modified_base (5)..(5): 5-methyl modified nucleotide
  source: /note="3' tri-ethylene glycol (TEG)"
acaucaaggaagau

SEQ ID NO: 18978 - RNA, 13 nt, Artificial Sequence
  source: /note="Description of Artificial Sequence: Synthetic oligonucleotide"
  source: /note="RNA"
  source: /note="5' tri-ethylene glycol (TEG)"
  modified_base (1)..(1): bicyclic nucleic acid (BNA)
  modified_base (2)..(2): 5-methyl bicyclic nucleic acid
  modified_base (5)..(5): 5-methyl modified nucleotide
  source: /note="3' tri-ethylene glycol (TEG)"
acaucaaggaaga

SEQ ID NO: 18979 - RNA, 12 nt, Artificial Sequence
  source: /note="Description of Artificial Sequence: Synthetic oligonucleotide"
  source: /note="RNA"
  source: /note="5' tri-ethylene glycol (TEG)"
  modified_base (1)..(1): bicyclic nucleic acid (BNA)
  modified_base (2)..(2): 5-methyl bicyclic nucleic acid
  modified_base (5)..(5): 5-methyl modified nucleotide
  source: /note="3' tri-ethylene glycol (TEG)"
acaucaaggaag

SEQ ID NO: 18980 - RNA, 24 nt, Artificial Sequence
  source: /note="Description of Artificial Sequence: Synthetic oligonucleotide"
  source: /note="RNA"
  source: /note="5' tri-ethylene glycol (TEG)"
  modified_base (1)..(1): 5-methyl bicyclic nucleic acid
  modified_base (2)..(2): bicyclic nucleic acid (BNA)
  modified_base (4)..(4): 5-methyl modified nucleotide
  modified_base (16)..(16): 5-methyl modified nucleotide
  modified_base (21)..(21): 5-methyl modified nucleotide
  source: /note="3' tri-ethylene glycol (TEG)"
caucaaggaagauggcauuucuag

SEQ ID NO: 18981 - RNA, 23 nt, Artificial Sequence
  source: /note="Description of Artificial Sequence: Synthetic oligonucleotide"
  source: /note="RNA"
  source: /note="5' tri-ethylene glycol (TEG)"
  modified_base (1)..(1): 5-methyl bicyclic nucleic acid
  modified_base (2)..(2): bicyclic nucleic acid (BNA)
  modified_base (4)..(4): 5-methyl modified nucleotide
  modified_base (16)..(16): 5-methyl modified nucleotide
  modified_base (21)..(21): 5-methyl modified nucleotide
  source: /note="3' tri-ethylene glycol (TEG)"
caucaaggaagauggcauuucua

SEQ ID NO: 18982 - RNA, 22 nt, Artificial Sequence
  source: /note="Description of Artificial Sequence: Synthetic oligonucleotide"
  source: /note="RNA"
  source: /note="5' tri-ethylene glycol (TEG)"
  modified_base (1)..(1): 5-methyl bicyclic nucleic acid
  modified_base (2)..(2): bicyclic nucleic acid (BNA)
  modified_base (4)..(4): 5-methyl modified nucleotide
  modified_base (16)..(16): 5-methyl modified nucleotide
  modified_base (21)..(21): 5-methyl modified nucleotide
  source: /note="3' tri-ethylene glycol (TEG)"
caucaaggaagauggcauuucu

SEQ ID NO: 18983 - RNA, 21 nt, Artificial Sequence
  source: /note="Description of Artificial Sequence: Synthetic oligonucleotide"
  source: /note="RNA"
  source: /note="5' tri-ethylene glycol (TEG)"
  modified_base (1)..(1): 5-methyl bicyclic nucleic acid
  modified_base (2)..(2): bicyclic nucleic acid (BNA)
  modified_base (4)..(4): 5-methyl modified nucleotide
  modified_base (16)..(16): 5-methyl modified nucleotide
  modified_base (21)..(21): 5-methyl modified nucleotide
  source: /note="3' tri-ethylene glycol (TEG)"
caucaaggaagauggcauuuc

SEQ ID NO: 18984 - RNA, 20 nt, Artificial Sequence
  source: /note="Description of Artificial Sequence: Synthetic oligonucleotide"
  source: /note="RNA"
  source: /note="5' tri-ethylene glycol (TEG)"
  modified_base (1)..(1): 5-methyl bicyclic nucleic acid
  modified_base (2)..(2): bicyclic nucleic acid (BNA)
  modified_base (4)..(4): 5-methyl modified nucleotide
  modified_base (16)..(16): 5-methyl modified nucleotide
  source: /note="3' tri-ethylene glycol (TEG)"
caucaaggaagauggcauuu

SEQ ID NO: 18985 - RNA, 19 nt, Artificial Sequence
  source: /note="Description of Artificial Sequence: Synthetic oligonucleotide"
  source: /note="RNA"
  source: /note="5' tri-ethylene glycol (TEG)"
  modified_base (1)..(1): 5-methyl bicyclic nucleic acid
  modified_base (2)..(2): bicyclic nucleic acid (BNA)
  modified_base (4)..(4): 5-methyl modified nucleotide
  modified_base (16)..(16): 5-methyl modified nucleotide
  source: /note="3' tri-ethylene glycol (TEG)"
caucaaggaagauggcauu

SEQ ID NO: 18986 - RNA, 18 nt, Artificial Sequence
  source: /note="Description of Artificial Sequence: Synthetic oligonucleotide"
  source: /note="RNA"
  source: /note="5' tri-ethylene glycol (TEG)"
  modified_base (1)..(1): 5-methyl bicyclic nucleic acid
  modified_base (2)..(2): bicyclic nucleic acid (BNA)
  modified_base (4)..(4): 5-methyl modified nucleotide
  modified_base (16)..(16): 5-methyl modified nucleotide
  source: /note="3' tri-ethylene glycol (TEG)"
caucaaggaagauggcau

SEQ ID NO: 18987 - RNA, 17 nt, Artificial Sequence
  source: /note="Description of Artificial Sequence: Synthetic oligonucleotide"
  source: /note="RNA"
  source: /note="5' tri-ethylene glycol (TEG)"
  modified_base (1)..(1): 5-methyl bicyclic nucleic acid
  modified_base (2)..(2): bicyclic nucleic acid (BNA)
  modified_base (4)..(4): 5-methyl modified nucleotide
  modified_base (16)..(16): 5-methyl modified nucleotide
  source: /note="3' tri-ethylene glycol (TEG)"
caucaaggaagauggca

SEQ ID NO: 18988 - RNA, 16 nt, Artificial Sequence
  source: /note="Description of Artificial Sequence: Synthetic oligonucleotide"
  source: /note="RNA"
  source: /note="5' tri-ethylene glycol (TEG)"
  modified_base (1)..(1): 5-methyl bicyclic nucleic acid
  modified_base (2)..(2): bicyclic nucleic acid (BNA)
  modified_base (4)..(4): 5-methyl modified nucleotide
  modified_base (16)..(16): 5-methyl modified nucleotide
  source: /note="3' tri-ethylene glycol (TEG)"
caucaaggaagauggc

SEQ ID NO: 18989 - RNA, 15 nt, Artificial Sequence
  source: /note="Description of Artificial Sequence: Synthetic oligonucleotide"
  source: /note="RNA"
  source: /note="5' tri-ethylene glycol (TEG)"
  modified_base (1)..(1): 5-methyl bicyclic nucleic acid
  modified_base (2)..(2): bicyclic nucleic acid (BNA)
  modified_base (4)..(4): 5-methyl modified nucleotide
  source: /note="3' tri-ethylene glycol (TEG)"
caucaaggaagaugg

SEQ ID NO: 18990 - RNA, 14 nt, Artificial Sequence
  source: /note="Description of Artificial Sequence: Synthetic oligonucleotide"
  source: /note="RNA"
  source: /note="5' tri-ethylene glycol (TEG)"
  modified_base (1)..(1): 5-methyl bicyclic nucleic acid
  modified_base (2)..(2): bicyclic nucleic acid (BNA)
  modified_base (4)..(4): 5-methyl modified nucleotide
  source: /note="3' tri-ethylene glycol (TEG)"
caucaaggaagaug

SEQ ID NO: 18991 - RNA, 13 nt, Artificial Sequence
  source: /note="Description of Artificial Sequence: Synthetic oligonucleotide"
  source: /note="RNA"
  source: /note="5' tri-ethylene glycol (TEG)"
  modified_base (1)..(1): 5-methyl bicyclic nucleic acid
  modified_base (2)..(2): bicyclic nucleic acid (BNA)
  modified_base (4)..(4): 5-methyl modified nucleotide
  source: /note="3' tri-ethylene glycol (TEG)"
caucaaggaagau

SEQ ID NO: 18992 - RNA, 12 nt, Artificial Sequence
  source: /note="Description of Artificial Sequence: Synthetic oligonucleotide"
  source: /note="RNA"
  source: /note="5' tri-ethylene glycol (TEG)"
  modified_base (1)..(1): 5-methyl bicyclic nucleic acid
  modified_base (2)..(2): bicyclic nucleic acid (BNA)
  modified_base (4)..(4): 5-methyl modified nucleotide
  source: /note="3' tri-ethylene glycol (TEG)"
caucaaggaaga

SEQ ID NO: 18993 - RNA, 11 nt, Artificial Sequence
  source: /note="Description of Artificial Sequence: Synthetic oligonucleotide"
  source: /note="RNA"
  source: /note="5' tri-ethylene glycol (TEG)"
  modified_base (1)..(1): 5-methyl bicyclic nucleic acid
  modified_base (2)..(2): bicyclic nucleic acid (BNA)
  modified_base (4)..(4): 5-methyl modified nucleotide
  source: /note="3' tri-ethylene glycol (TEG)"
caucaaggaag

SEQ ID NO: 18994 - DNA, 23 bp, Artificial Sequence
  source: /note="Description of Artificial Sequence: Synthetic oligonucleotide"
  source: /note="Description of Combined DNA/RNA Molecule: Synthetic oligonucleotide"
  source: /note="DNA/RNA"
  source: /note="5' tri-ethylene glycol (TEG)"
  modified_base (1)..(1): bicyclic nucleic acid (BNA)
  modified_base (2)..(2): bicyclic nucleic acid (BNA)
  modified_base (3)..(3): 5-methyl modified nucleotide
  modified_base (15)..(15): 5-methyl modified nucleotide
  modified_base (20)..(20): 5-methyl modified nucleotide
  source: /note="3' tri-ethylene glycol (TEG)"
atcaaggaagauggcauuucuag

SEQ ID NO: 18995 - DNA, 22 bp, Artificial Sequence
  source: /note="Description of Artificial Sequence: Synthetic oligonucleotide"
  source: /note="Description of Combined DNA/RNA Molecule: Synthetic oligonucleotide"
  source: /note="DNA/RNA"
  source: /note="5' tri-ethylene glycol (TEG)"
  modified_base (1)..(1): bicyclic nucleic acid (BNA)
  modified_base (2)..(2): bicyclic nucleic acid (BNA)
  modified_base (3)..(3): 5-methyl modified nucleotide
  modified_base (15)..(15): 5-methyl modified nucleotide
  modified_base (20)..(20): 5-methyl modified nucleotide
  source: /note="3' tri-ethylene glycol (TEG)"
atcaaggaagauggcauuucua

SEQ ID NO: 18996 - DNA, 21 bp, Artificial Sequence
  source: /note="Description of Artificial Sequence: Synthetic oligonucleotide"
  source: /note="Description of Combined DNA/RNA Molecule: Synthetic oligonucleotide"
  source: /note="DNA/RNA"
  source: /note="5' tri-ethylene glycol (TEG)"
  modified_base (1)..(1): bicyclic nucleic acid (BNA)
  modified_base (2)..(2): bicyclic nucleic acid (BNA)
  modified_base (3)..(3): 5-methyl modified nucleotide
  modified_base (15)..(15): 5-methyl modified nucleotide
  modified_base (20)..(20): 5-methyl modified nucleotide
  source: /note="3' tri-ethylene glycol (TEG)"
atcaaggaagauggcauuucu

SEQ ID NO: 18997 - DNA, 20 bp, Artificial Sequence
  source: /note="Description of Artificial Sequence: Synthetic oligonucleotide"
  source: /note="Description of Combined DNA/RNA Molecule: Synthetic oligonucleotide"
  source: /note="DNA/RNA"
  source: /note="5' tri-ethylene glycol (TEG)"
  modified_base (1)..(1): bicyclic nucleic acid (BNA)
  modified_base (2)..(2): bicyclic nucleic acid (BNA)
  modified_base (3)..(3): 5-methyl modified nucleotide
  modified_base (15)..(15): 5-methyl modified nucleotide
  modified_base (20)..(20): 5-methyl modified nucleotide
  source: /note="3' tri-ethylene glycol (TEG)"
atcaaggaagauggcauuuc

SEQ ID NO: 18998 - DNA, 19 bp, Artificial Sequence
  source: /note="Description of Artificial Sequence: Synthetic oligonucleotide"
  source: /note="Description of Combined DNA/RNA Molecule: Synthetic oligonucleotide"
  source: /note="DNA/RNA"
  source: /note="5' tri-ethylene glycol (TEG)"
  modified_base (1)..(1): bicyclic nucleic acid (BNA)
  modified_base (2)..(2): bicyclic nucleic acid (BNA)
  modified_base (3)..(3): 5-methyl modified nucleotide
  modified_base (15)..(15): 5-methyl modified nucleotide
  source: /note="3' tri-ethylene glycol (TEG)"
atcaaggaagauggcauuu

SEQ ID NO: 18999 - DNA, 18 bp, Artificial Sequence
  source: /note="Description of Artificial Sequence: Synthetic oligonucleotide"
  source: /note="Description of Combined DNA/RNA Molecule: Synthetic oligonucleotide"
  source: /note="DNA/RNA"
  source: /note="5' tri-ethylene glycol (TEG)"
  modified_base (1)..(1): bicyclic nucleic acid (BNA)
  modified_base (2)..(2): bicyclic nucleic acid (BNA)
  modified_base (3)..(3): 5-methyl modified nucleotide
  modified_base (15)..(15): 5-methyl modified nucleotide
  source: /note="3' tri-ethylene glycol (TEG)"
atcaaggaagauggcauu

SEQ ID NO: 19000 - DNA, 17 bp, Artificial Sequence
  source: /note="Description of Artificial Sequence: Synthetic oligonucleotide"
  source: /note="Description of Combined DNA/RNA Molecule: Synthetic oligonucleotide"
  source: /note="DNA/RNA"
  source: /note="5' tri-ethylene glycol (TEG)"
  modified_base (1)..(1): bicyclic nucleic acid (BNA)
  modified_base (2)..(2): bicyclic nucleic acid (BNA)
  modified_base (3)..(3): 5-methyl modified nucleotide
  modified_base (15)..(15): 5-methyl modified nucleotide
  source: /note="3' tri-ethylene glycol (TEG)"
atcaaggaagauggcau

SEQ ID NO: 19001 - DNA, 16 bp, Artificial Sequence
  source: /note="Description of Artificial Sequence: Synthetic oligonucleotide"
  source: /note="Description of Combined DNA/RNA Molecule: Synthetic oligonucleotide"
  source: /note="DNA/RNA"
  source: /note="5' tri-ethylene glycol (TEG)"
  modified_base (1)..(1): bicyclic nucleic acid (BNA)
  modified_base (2)..(2): bicyclic nucleic acid (BNA)
  modified_base (3)..(3): 5-methyl modified nucleotide
  modified_base (15)..(15): 5-methyl modified nucleotide
  source: /note="3' tri-ethylene glycol (TEG)"
atcaaggaagauggca

SEQ ID NO: 19002 - DNA, 15 bp, Artificial Sequence
  source: /note="Description of Artificial Sequence: Synthetic oligonucleotide"
  source: /note="Description of Combined DNA/RNA Molecule: Synthetic oligonucleotide"
  source: /note="DNA/RNA"
  source: /note="5' tri-ethylene glycol (TEG)"
  modified_base (1)..(1): bicyclic nucleic acid (BNA)
  modified_base (2)..(2): bicyclic nucleic acid (BNA)
  modified_base (3)..(3): 5-methyl modified nucleotide
  modified_base (15)..(15): 5-methyl modified nucleotide
  source: /note="3' tri-ethylene glycol (TEG)"
atcaaggaagauggc

SEQ ID NO: 19003 - DNA, 14 bp, Artificial Sequence
  source: /note="Description of Artificial Sequence: Synthetic oligonucleotide"
  source: /note="Description of Combined DNA/RNA Molecule: Synthetic oligonucleotide"
  source: /note="DNA/RNA"
  source: /note="5' tri-ethylene glycol (TEG)"
  modified_base (1)..(1): bicyclic nucleic acid (BNA)
  modified_base (2)..(2): bicyclic nucleic acid (BNA)
  modified_base (3)..(3): 5-methyl modified nucleotide
  source: /note="3' tri-ethylene glycol (TEG)"
atcaaggaagaugg

SEQ ID NO: 19004 - DNA, 13 bp, Artificial Sequence
  source: /note="Description of Artificial Sequence: Synthetic oligonucleotide"
  source: /note="Description of Combined DNA/RNA Molecule: Synthetic oligonucleotide"
  source: /note="DNA/RNA"
  source: /note="5' tri-ethylene glycol (TEG)"
  modified_base (1)..(1): bicyclic nucleic acid (BNA)
  modified_base (2)..(2): bicyclic nucleic acid (BNA)
  modified_base (3)..(3): 5-methyl modified nucleotide
  source: /note="3' tri-ethylene glycol (TEG)"
atcaaggaagaug

SEQ ID NO: 19005 - DNA, 12 bp, Artificial Sequence
  source: /note="Description of Artificial Sequence: Synthetic oligonucleotide"
  source: /note="Description of Combined DNA/RNA Molecule: Synthetic oligonucleotide"
  source: /note="DNA/RNA"
  source: /note="5' tri-ethylene glycol (TEG)"
  modified_base (1)..(1): bicyclic nucleic acid (BNA)
  modified_base (2)..(2): bicyclic nucleic acid (BNA)
  modified_base (3)..(3): 5-methyl modified nucleotide
  source: /note="3' tri-ethylene glycol (TEG)"
atcaaggaagau

SEQ ID NO: 19006 - DNA, 11 bp, Artificial Sequence
  source: /note="Description of Artificial Sequence: Synthetic oligonucleotide"
  source: /note="DNA/RNA"
  source: /note="5' tri-ethylene glycol (TEG)"
  modified_base (1)..(1): bicyclic nucleic acid (BNA)
  modified_base (2)..(2): bicyclic nucleic acid (BNA)
  modified_base (3)..(3): 5-methyl modified nucleotide
  source: /note="3' tri-ethylene glycol (TEG)"
atcaaggaaga

SEQ ID NO: 19007 - DNA, 10 bp, Artificial Sequence
  source: /note="Description of Artificial Sequence: Synthetic oligonucleotide"
  source: /note="DNA/RNA"
  source: /note="5' tri-ethylene glycol (TEG)"
  modified_base (1)..(1): bicyclic nucleic acid (BNA)
  modified_base (2)..(2): bicyclic nucleic acid (BNA)
  modified_base (3)..(3): 5-methyl modified nucleotide
  source: /note="3' tri-ethylene glycol (TEG)"
atcaaggaag

SEQ ID NO: 19008 - RNA, 23 nt, Artificial Sequence
  source: /note="Description of Artificial Sequence: Synthetic oligonucleotide"
  source: /note="RNA"
  source: /note="5' tri-ethylene glycol (TEG)"
  modified_base (1)..(1): 5-methyl bicyclic nucleic acid
  modified_base (2)..(2): 5-methyl bicyclic nucleic acid
  modified_base (7)..(7): 5-methyl modified nucleotide
  modified_base (13)..(13): 5-methyl modified nucleotide
  modified_base (14)..(14): 5-methyl modified nucleotide
  modified_base (16)..(16): 5-methyl modified nucleotide
  modified_base (17)..(17): 5-methyl modified nucleotide
  modified_base (20)..(20): 5-methyl modified nucleotide
  modified_base (23)..(23): 5-methyl modified nucleotide
  source: /note="3' tri-ethylene glycol (TEG)"
ccagagcagguaccuccaacauc

SEQ ID NO: 19009 - RNA, 18 nt, Artificial Sequence
  source: /note="Description of Artificial Sequence: Synthetic oligonucleotide"
  source: /note="RNA"
  source: /note="5' tri-ethylene glycol (TEG)"
  modified_base (1)..(1): 5-methyl bicyclic nucleic acid
  modified_base (2)..(2): 5-methyl bicyclic nucleic acid
  modified_base (7)..(7): 5-methyl modified nucleotide
  modified_base (13)..(13): 5-methyl modified nucleotide
  modified_base (14)..(14): 5-methyl modified nucleotide
  modified_base (16)..(16): 5-methyl modified nucleotide
  modified_base (17)..(17): 5-methyl modified nucleotide
  source: /note="3' tri-ethylene glycol (TEG)"
ccagagcagguaccucca

SEQ ID NO: 19010 - RNA, 23 nt, Artificial Sequence
  source: /note="Description of Artificial Sequence: Synthetic oligonucleotide"
  source: /note="RNA"
  source: /note="5' tri-ethylene glycol (TEG)"
  modified_base (1)..(1): 5-methyl bicyclic nucleic acid
  modified_base (2)..(2): 5-methyl bicyclic nucleic acid
  modified_base (4)..(4): 5-methyl modified nucleotide
  modified_base (18)..(18): 5-methyl modified nucleotide
  source: /note="3' tri-ethylene glycol (TEG)"
ccucugugauuuuauaacuugau

SEQ ID NO: 19011 - DNA, 17 bp, Artificial Sequence
  source: /note="Description of Artificial Sequence: Synthetic oligonucleotide"
  source: /note="Description of Combined DNA/RNA Molecule: Synthetic oligonucleotide"
  source: /note="DNA/RNA"
  source: /note="5' tri-ethylene glycol (TEG)"
  modified_base (1)..(1): bicyclic nucleic acid (BNA)
  modified_base (2)..(2): 5-methyl bicyclic nucleic acid
  modified_base (4)..(4): 5-methyl modified nucleotide
  modified_base (5)..(5): 5-methyl modified nucleotide
  modified_base (6)..(6): 5-methyl modified nucleotide
  modified_base (8)..(8): 5-methyl modified nucleotide
  modified_base (9)..(9): 5-methyl modified nucleotide
  modified_base (12)..(12): 5-methyl modified nucleotide
  modified_base (14)..(14): 5-methyl modified nucleotide
  modified_base (15)..(15): 5-methyl modified nucleotide
  modified_base (16)..(16): 5-methyl modified nucleotide
  source: /note="3' tri-ethylene glycol (TEG)"
tcacccaccaucacccu

SEQ ID NO: 19012 - DNA, 20 bp, Artificial Sequence
  source: /note="Description of Artificial Sequence: Synthetic oligonucleotide"
  source: /note="Description of Combined DNA/RNA Molecule: Synthetic oligonucleotide"
  source: /note="DNA/RNA"
  source: /note="5' tri-ethylene glycol (TEG)"
  modified_base (1)..(1): bicyclic nucleic acid (BNA)
  modified_base (2)..(2): bicyclic nucleic acid (BNA)
  modified_base (7)..(7): 5-methyl modified nucleotide
  modified_base (8)..(8): 5-methyl modified nucleotide
  modified_base (10)..(10): 5-methyl modified nucleotide
  modified_base (16)..(16): 5-methyl modified nucleotide
  modified_base (18)..(18): 5-methyl modified nucleotide
  modified_base (19)..(19): 5-methyl modified nucleotide
  modified_base (20)..(20): 5-methyl modified nucleotide
  source: /note="3' tri-ethylene glycol (TEG)"
tgauauccucaaggucaccc

SEQ ID NO: 19013 - DNA, 22 bp, Artificial Sequence
  source: /note="Description of Artificial Sequence: Synthetic oligonucleotide"
  source: /note="Description of Combined DNA/RNA Molecule: Synthetic oligonucleotide"
  source: /note="DNA/RNA"
  source: /note="5' tri-ethylene glycol (TEG)"
  modified_base (1)..(1): 5-methyl bicyclic nucleic acid
  modified_base (2)..(2): bicyclic nucleic acid (BNA)
  modified_base (4)..(4): 5-methyl modified nucleotide
  modified_base (13)..(13): 5-methyl modified nucleotide
  modified_base (16)..(16): 5-methyl modified nucleotide
  modified_base (18)..(18): 5-methyl modified nucleotide
  source: /note="3' tri-ethylene glycol (TEG)"
ctgcuugaugaucaucucguug

SEQ ID NO: 19014 - DNA, 18 bp, Artificial Sequence
  source: /note="Description of Artificial Sequence: Synthetic oligonucleotide"
  source: /note="Description of Combined DNA/RNA Molecule: Synthetic oligonucleotide"
  source: /note="DNA/RNA"
  source: /note="5' tri-ethylene glycol (TEG)"
  modified_base (1)..(1): 5-methyl bicyclic nucleic acid
  modified_base (2)..(2): bicyclic nucleic acid (BNA)
  modified_base (4)..(4): 5-methyl modified nucleotide
  modified_base (13)..(13): 5-methyl modified nucleotide
  modified_base (16)..(16): 5-methyl modified nucleotide
  modified_base (18)..(18): 5-methyl modified nucleotide
  source: /note="3' tri-ethylene glycol (TEG)"
ctgcuugaugaucaucuc

SEQ ID NO: 19015 - DNA, 19 bp, Artificial Sequence
  source: /note="Description of Artificial Sequence: Synthetic oligonucleotide"
  source: /note="Description of Combined DNA/RNA Molecule: Synthetic oligonucleotide"
  source: /note="DNA/RNA"
  source: /note="5' tri-ethylene glycol (TEG)"
  modified_base (1)..(1): bicyclic nucleic acid (BNA)
  modified_base (2)..(2): bicyclic nucleic acid (BNA)
  modified_base (5)..(5): 5-methyl modified nucleotide
  modified_base (6)..(6): 5-methyl modified nucleotide
  modified_base (14)..(14): 5-methyl modified nucleotide
  modified_base (15)..(15): 5-methyl modified nucleotide
  modified_base (17)..(17): 5-methyl modified nucleotide
  source: /note="3' tri-ethylene glycol (TEG)"
gtuuccuuaguaaccacag

SEQ ID NO: 19016 - DNA, 17 bp, Artificial Sequence
  source: /note="Description of Artificial Sequence: Synthetic oligonucleotide"
  source: /note="Description of Combined DNA/RNA Molecule: Synthetic oligonucleotide"
  source: /note="DNA/RNA"
  source: /note="5' tri-ethylene glycol (TEG)"
  modified_base (1)..(1): bicyclic nucleic acid (BNA)
  modified_base (2)..(2): bicyclic nucleic acid (BNA)
  modified_base (5)..(5): 5-methyl modified nucleotide
  modified_base (6)..(6): 5-methyl modified nucleotide
  modified_base (14)..(14): 5-methyl modified nucleotide
  modified_base (15)..(15): 5-methyl modified nucleotide
  modified_base (17)..(17): 5-methyl modified nucleotide
  source: /note="3' tri-ethylene glycol (TEG)"
gtuuccuuaguaaccac

SEQ ID NO: 19017 - DNA, 20 bp, Artificial Sequence
  source: /note="Description of Artificial Sequence: Synthetic oligonucleotide"
  source: /note="Description of Combined DNA/RNA Molecule: Synthetic oligonucleotide"
  source: /note="DNA/RNA"
  modified_base (2)..(2): 5-methyl modified nucleotide
  modified_base (14)..(14): 5-methyl modified nucleotide
  modified_base (19)..(19): 5-methyl bicyclic nucleic acid
  modified_base (20)..(20): bicyclic nucleic acid (BNA)
ucaaggaagauggcauuuct

SEQ ID NO: 19018 - RNA, 22 nt, Artificial Sequence
  source: /note="Description of Artificial Sequence: Synthetic oligonucleotide"
  source: /note="RNA"
  modified_base (2)..(2): 5-methyl modified nucleotide
  modified_base (14)..(14): 5-methyl modified nucleotide
  modified_base (19)..(19): 5-methyl modified nucleotide
  modified_base (21)..(21): bicyclic nucleic acid (BNA)
  modified_base (22)..(22): bicyclic nucleic acid (BNA)
ucaaggaagauggcauuucuag

SEQ ID NO: 19019 - RNA, 18 nt, Artificial Sequence
  source: /note="Description of Artificial Sequence: Synthetic oligonucleotide"
  source: /note="RNA"
  modified_base (9)..(9): 5-methyl modified nucleotide
  modified_base (13)..(13): 5-methyl modified nucleotide
  modified_base (14)..(14): 5-methyl modified nucleotide
  modified_base (17)..(17): bicyclic nucleic acid (BNA)
  modified_base (18)..(18): 5-methyl bicyclic nucleic acid
gguaaguucuguccaagc

SEQ ID NO: 19020 - RNA, 18 nt, Artificial Sequence
  source: /note="Description of Artificial Sequence: Synthetic oligonucleotide"
  source: /note="RNA"
  modified_base (8)..(8): 5-methyl modified nucleotide
  modified_base (12)..(12): 5-methyl modified nucleotide
  modified_base (13)..(13): 5-methyl modified nucleotide
  modified_base (17)..(17): 5-methyl bicyclic nucleic acid
  modified_base (18)..(18): 5-methyl bicyclic nucleic acid
guaaguucuguccaagcc

SEQ ID NO: 19021 - RNA, 18 nt, Artificial Sequence
  source: /note="Description of Artificial Sequence: Synthetic oligonucleotide"
  source: /note="RNA"
  modified_base (4)..(4): 5-methyl modified nucleotide
  modified_base (13)..(13): 5-methyl modified nucleotide
  modified_base (17)..(17): 5-methyl bicyclic nucleic acid
  modified_base (18)..(18): 5-methyl bicyclic nucleic acid
agucgguaaguucugucc

SEQ ID NO: 19022 - RNA, 18 nt, Artificial Sequence
  source: /note="Description of Artificial Sequence: Synthetic oligonucleotide"
  source: /note="RNA"
  modified_base (1)..(1): 5-methyl modified nucleotide
  modified_base (5)..(5): 5-methyl modified nucleotide
  modified_base (6)..(6): 5-methyl modified nucleotide
  modified_base (10)..(10): 5-methyl modified nucleotide
  modified_base (11)..(11): 5-methyl modified nucleotide
  modified_base (12)..(12): 5-methyl modified nucleotide
  modified_base (17)..(17): bicyclic nucleic acid (BNA)
  modified_base (18)..(18): bicyclic nucleic acid (BNA)
cuguccaagcccgguuga

SEQ ID NO: 19023 - RNA, 15 nt, Artificial Sequence
  source: /note="Description of Artificial Sequence: Synthetic oligonucleotide"
  source: /note="RNA"
  modified_base (7)..(7): 5-methyl modified nucleotide
  modified_base (11)..(11): 5-methyl modified nucleotide
  modified_base (12)..(12): 5-methyl modified nucleotide
  modified_base (14)..(14): bicyclic nucleic acid (BNA)
  modified_base (15)..(15): bicyclic nucleic acid (BNA)
uaaguucuguccaag

SEQ ID NO: 19024 - RNA, 20 nt, Artificial Sequence
  source: /note="Description of Artificial Sequence: Synthetic oligonucleotide"
  source: /note="RNA"
  modified_base (3)..(3): 5-methyl modified nucleotide
  modified_base (7)..(7): 5-methyl modified nucleotide
  modified_base (8)..(8): 5-methyl modified nucleotide
  modified_base (12)..(12): 5-methyl modified nucleotide
  modified_base (13)..(13): 5-methyl modified nucleotide
  modified_base (14)..(14): 5-methyl modified nucleotide
  modified_base (19)..(19): bicyclic nucleic acid (BNA)
  modified_base (20)..(20): bicyclic nucleic acid (BNA)
uucuguccaagcccgguuga

SEQ ID NO: 19025 - DNA, 19 bp, Artificial Sequence
  source: /note="Description of Artificial Sequence: Synthetic oligonucleotide"
  source: /note="Description of Combined DNA/RNA Molecule: Synthetic oligonucleotide"
  source: /note="DNA/RNA"
  modified_base (3)..(3): 5-methyl modified nucleotide
  modified_base (7)..(7): 5-methyl modified nucleotide
  modified_base (8)..(8): 5-methyl modified nucleotide
  modified_base (12)..(12): 5-methyl modified nucleotide
  modified_base (13)..(13): 5-methyl modified nucleotide
  modified_base (14)..(14): 5-methyl modified nucleotide
  modified_base (18)..(18): bicyclic nucleic acid (BNA)
  modified_base (19)..(19): bicyclic nucleic acid (BNA)
uucuguccaagcccggutg

SEQ ID NO: 19026 - DNA, 18 bp, Artificial Sequence
  source: /note="Description of Artificial Sequence: Synthetic oligonucleotide"
  source: /note="Description of Combined DNA/RNA Molecule: Synthetic oligonucleotide"
  source: /note="DNA/RNA"
  modified_base (3)..(3): 5-methyl modified nucleotide
  modified_base (7)..(7): 5-methyl modified nucleotide
  modified_base (8)..(8): 5-methyl modified nucleotide
  modified_base (12)..(12): 5-methyl modified nucleotide
  modified_base (13)..(13): 5-methyl modified nucleotide
  modified_base (14)..(14): 5-methyl modified nucleotide
  modified_base (17)..(17): bicyclic nucleic acid (BNA)
  modified_base (18)..(18): bicyclic nucleic acid (BNA)
uucuguccaagcccggtt

SEQ ID NO: 19027 - DNA, 17 bp, Artificial Sequence
  source: /note="Description of Artificial Sequence: Synthetic oligonucleotide"
  source: /note="Description of Combined DNA/RNA Molecule: Synthetic oligonucleotide"
  source: /note="DNA/RNA"
  modified_base (3)..(3): 5-methyl modified nucleotide
  modified_base (7)..(7): 5-methyl modified nucleotide
  modified_base (8)..(8): 5-methyl modified nucleotide
  modified_base (12)..(12): 5-methyl modified nucleotide
  modified_base (13)..(13): 5-methyl modified nucleotide
  modified_base (14)..(14): 5-methyl modified nucleotide
  modified_base (16)..(16): bicyclic nucleic acid (BNA)
  modified_base (17)..(17): bicyclic nucleic acid (BNA)
uucuguccaagcccggt

SEQ ID NO: 19028 - RNA, 16 nt, Artificial Sequence
  source: /note="Description of Artificial Sequence: Synthetic oligonucleotide"
  source: /note="RNA"
  modified_base (3)..(3): 5-methyl modified nucleotide
  modified_base (7)..(7): 5-methyl modified nucleotide
  modified_base (8)..(8): 5-methyl modified nucleotide
  modified_base (12)..(12): 5-methyl modified nucleotide
  modified_base (13)..(13): 5-methyl modified nucleotide
  modified_base (14)..(14): 5-methyl modified nucleotide
  modified_base (15)..(15): bicyclic nucleic acid (BNA)
  modified_base (16)..(16): bicyclic nucleic acid (BNA)
uucuguccaagcccgg

SEQ ID NO: 19029 - RNA, 15 nt, Artificial Sequence
  source: /note="Description of Artificial Sequence: Synthetic oligonucleotide"
  source: /note="RNA"
  modified_base (3)..(3): 5-methyl modified nucleotide
  modified_base (7)..(7): 5-methyl modified nucleotide
  modified_base (8)..(8): 5-methyl modified nucleotide
  modified_base (12)..(12): 5-methyl modified nucleotide
  modified_base (13)..(13): 5-methyl modified nucleotide
  modified_base (14)..(14): 5-methyl bicyclic nucleic acid
  modified_base (15)..(15): bicyclic nucleic acid (BNA)
uucuguccaagcccg

SEQ ID NO: 19030 - RNA, 14 nt, Artificial Sequence
  source: /note="Description of Artificial Sequence: Synthetic oligonucleotide"
  source: /note="RNA"
  modified_base (3)..(3): 5-methyl modified nucleotide
  modified_base (7)..(7): 5-methyl modified nucleotide
  modified_base (8)..(8): 5-methyl modified nucleotide
  modified_base (12)..(12): 5-methyl modified nucleotide
  modified_base (13)..(13): 5-methyl bicyclic nucleic acid
  modified_base (14)..(14): 5-methyl bicyclic nucleic acid
uucuguccaagccc

SEQ ID NO: 19031 - RNA, 13 nt, Artificial Sequence
  source: /note="Description of Artificial Sequence: Synthetic oligonucleotide"
  source: /note="RNA"
  modified_base (3)..(3): 5-methyl modified nucleotide
  modified_base (7)..(7): 5-methyl modified nucleotide
  modified_base (8)..(8): 5-methyl modified nucleotide
  modified_base (12)..(12): 5-methyl bicyclic nucleic acid
  modified_base (13)..(13): 5-methyl bicyclic nucleic acid
uucuguccaagcc

SEQ ID NO: 19032 - RNA, 12 nt, Artificial Sequence
  source: /note="Description of Artificial Sequence: Synthetic oligonucleotide"
  source: /note="RNA"
  modified_base (3)..(3): 5-methyl modified nucleotide
  modified_base (7)..(7): 5-methyl modified nucleotide
  modified_base (8)..(8): 5-methyl modified nucleotide
  modified_base (11)..(11): bicyclic nucleic acid (BNA)
  modified_base (12)..(12): 5-methyl bicyclic nucleic acid
uucuguccaagc

SEQ ID NO: 19033 - RNA, 11 nt, Artificial Sequence
  source: /note="Description of Artificial Sequence: Synthetic oligonucleotide"
  source: /note="RNA"
  modified_base (3)..(3): 5-methyl modified nucleotide
  modified_base (7)..(7): 5-methyl modified nucleotide
  modified_base (8)..(8): 5-methyl modified nucleotide
  modified_base (10)..(10): bicyclic nucleic acid (BNA)
  modified_base (11)..(11): bicyclic nucleic acid (BNA)
uucuguccaag

SEQ ID NO: 19034 - RNA, 10 nt, Artificial Sequence
  source: /note="Description of Artificial Sequence: Synthetic oligonucleotide"
  source: /note="RNA"
  modified_base (3)..(3): 5-methyl modified nucleotide
  modified_base (7)..(7): 5-methyl modified nucleotide
  modified_base (8)..(8): 5-methyl modified nucleotide
  modified_base (9)..(9): bicyclic nucleic acid (BNA)
  modified_base (10)..(10): bicyclic nucleic acid (BNA)
uucuguccaa

SEQ ID NO: 19035 - RNA, 9 nt, Artificial Sequence
  source: /note="Description of Artificial Sequence: Synthetic oligonucleotide"
  source: /note="RNA"
  modified_base (3)..(3): 5-methyl modified nucleotide
  modified_base (7)..(7): 5-methyl modified nucleotide
  modified_base (8)..(8): 5-methyl bicyclic nucleic acid
  modified_base (9)..(9): bicyclic nucleic acid (BNA)
uucugucca

SEQ ID NO: 19036 - RNA, 8 nt, Artificial Sequence
  source: /note="Description of Artificial Sequence: Synthetic oligonucleotide"
  source: /note="RNA"
  modified_base (3)..(3): 5-methyl modified nucleotide
  modified_base (7)..(7): 5-methyl bicyclic nucleic acid
  modified_base (8)..(8): 5-methyl bicyclic nucleic acid
uucugucc

SEQ ID NO: 19037 - RNA, 19 nt, Artificial Sequence
  source: /note="Description of Artificial Sequence: Synthetic oligonucleotide"
  source: /note="RNA"
  modified_base (2)..(2): 5-methyl modified nucleotide
  modified_base (6)..(6): 5-methyl modified nucleotide
  modified_base (7)..(7): 5-methyl modified nucleotide
  modified_base (11)..(11): 5-methyl modified nucleotide
  modified_base (12)..(12): 5-methyl modified nucleotide
  modified_base (13)..(13): 5-methyl modified nucleotide
  modified_base (18)..(18): bicyclic nucleic acid (BNA)
  modified_base (19)..(19): bicyclic nucleic acid (BNA)
ucuguccaagcccgguuga

SEQ ID NO: 19038 - DNA, 18 bp, Artificial Sequence
  source: /note="Description of Artificial Sequence: Synthetic oligonucleotide"
  source: /note="Description of Combined DNA/RNA Molecule: Synthetic oligonucleotide"
  source: /note="DNA/RNA"
  modified_base (2)..(2): 5-methyl modified nucleotide
  modified_base (6)..(6): 5-methyl modified nucleotide
  modified_base (7)..(7): 5-methyl modified nucleotide
  modified_base (11)..(11): 5-methyl modified nucleotide
  modified_base (12)..(12): 5-methyl modified nucleotide
  modified_base (13)..(13): 5-methyl modified nucleotide
  modified_base (17)..(17): bicyclic nucleic acid (BNA)
  modified_base (18)..(18): bicyclic nucleic acid (BNA)
ucuguccaagcccggutg

SEQ ID NO: 19039 - DNA, 17 bp, Artificial Sequence
  source: /note="Description of Artificial Sequence: Synthetic oligonucleotide"
  source: /note="Description of Combined DNA/RNA Molecule: Synthetic oligonucleotide"
  source: /note="DNA/RNA"
  modified_base (2)..(2): 5-methyl modified nucleotide
  modified_base (6)..(6): 5-methyl modified nucleotide
  modified_base (7)..(7): 5-methyl modified nucleotide
  modified_base (11)..(11): 5-methyl modified nucleotide
  modified_base (12)..(12): 5-methyl modified nucleotide
  modified_base (13)..(13): 5-methyl modified nucleotide
  modified_base (16)..(16): bicyclic nucleic acid (BNA)
  modified_base (17)..(17): bicyclic nucleic acid (BNA)
ucuguccaagcccggtt

SEQ ID NO: 19040 - DNA, 16 bp, Artificial Sequence
  source: /note="Description of Artificial Sequence: Synthetic oligonucleotide"
  source: /note="Description of Combined DNA/RNA Molecule: Synthetic oligonucleotide"
  source: /note="DNA/RNA"
  modified_base (2)..(2): 5-methyl modified nucleotide
  modified_base (6)..(6): 5-methyl modified nucleotide
  modified_base (7)..(7): 5-methyl modified nucleotide
  modified_base (11)..(11): 5-methyl modified nucleotide
  modified_base (12)..(12): 5-methyl modified nucleotide
  modified_base (13)..(13): 5-methyl modified nucleotide
  modified_base (15)..(15): bicyclic nucleic acid (BNA)
  modified_base (16)..(16): bicyclic nucleic acid (BNA)
ucuguccaagcccggt

SEQ ID NO: 19041 - RNA, 15 nt, Artificial Sequence
  source: /note="Description of Artificial Sequence: Synthetic oligonucleotide"
  source: /note="RNA"
  modified_base (2)..(2): 5-methyl modified nucleotide
  modified_base (6)..(6): 5-methyl modified nucleotide
  modified_base (7)..(7): 5-methyl modified nucleotide
  modified_base (11)..(11): 5-methyl modified nucleotide
  modified_base (12)..(12): 5-methyl modified nucleotide
  modified_base (13)..(13): 5-methyl modified nucleotide
  modified_base (14)..(14): bicyclic nucleic acid (BNA)
  modified_base (15)..(15): bicyclic nucleic acid (BNA)
ucuguccaagcccgg

SEQ ID NO: 19042 - RNA, 14 nt, Artificial Sequence
  source: /note="Description of Artificial Sequence: Synthetic oligonucleotide"
  source: /note="RNA"
  modified_base (2)..(2): 5-methyl modified nucleotide
  modified_base (6)..(6): 5-methyl modified nucleotide
  modified_base (7)..(7): 5-methyl modified nucleotide
  modified_base (11)..(11): 5-methyl modified nucleotide
  modified_base (12)..(12): 5-methyl modified nucleotide
  modified_base (13)..(13): 5-methyl bicyclic nucleic acid
  modified_base (14)..(14): bicyclic nucleic acid (BNA)
ucuguccaagcccg

SEQ ID NO: 19043 - RNA, 13 nt, Artificial Sequence
  source: /note="Description of Artificial Sequence: Synthetic oligonucleotide"
  source: /note="RNA"
  modified_base (2)..(2): 5-methyl modified nucleotide
  modified_base (6)..(6): 5-methyl modified nucleotide
  modified_base (7)..(7): 5-methyl modified nucleotide
  modified_base (11)..(11): 5-methyl modified nucleotide
  modified_base (12)..(12): 5-methyl bicyclic nucleic acid
  modified_base (13)..(13): 5-methyl bicyclic nucleic acid
ucuguccaagccc

SEQ ID NO: 19044 - RNA, 12 nt, Artificial Sequence
  source: /note="Description of Artificial Sequence: Synthetic oligonucleotide"
  source: /note="RNA"
  modified_base (2)..(2): 5-methyl modified nucleotide
  modified_base (6)..(6): 5-methyl modified nucleotide
  modified_base (7)..(7): 5-methyl modified nucleotide
  modified_base (11)..(11): 5-methyl bicyclic nucleic acid
  modified_base (12)..(12): 5-methyl bicyclic nucleic acid
ucuguccaagcc

SEQ ID NO: 19045 - RNA, 11 nt, Artificial Sequence
  source: /note="Description of Artificial Sequence: Synthetic oligonucleotide"
  source: /note="RNA"
  modified_base (2)..(2): 5-methyl modified nucleotide
  modified_base (6)..(6): 5-methyl modified nucleotide
  modified_base (7)..(7): 5-methyl modified nucleotide
  modified_base (10)..(10): bicyclic nucleic acid (BNA)
  modified_base (11)..(11): 5-methyl bicyclic nucleic acid
ucuguccaagc

SEQ ID NO: 19046 - RNA, 10 nt, Artificial Sequence
  source: /note="Description of Artificial Sequence: Synthetic oligonucleotide"
  source: /note="RNA"
  modified_base (2)..(2): 5-methyl modified nucleotide
  modified_base (6)..(6): 5-methyl modified nucleotide
  modified_base (7)..(7): 5-methyl modified nucleotide
  modified_base (9)..(9): bicyclic nucleic acid (BNA)
  modified_base (10)..(10): bicyclic nucleic acid (BNA)
ucuguccaag

SEQ ID NO: 19047 - RNA, 9 nt, Artificial Sequence
  source: /note="Description of Artificial Sequence: Synthetic oligonucleotide"
  source: /note="RNA"
  modified_base (2)..(2): 5-methyl modified nucleotide
  modified_base (6)..(6): 5-methyl modified nucleotide
  modified_base (7)..(7): 5-methyl modified nucleotide
  modified_base (8)..(8): bicyclic nucleic acid (BNA)
  modified_base (9)..(9): bicyclic nucleic acid (BNA)
ucuguccaa

SEQ ID NO: 19048 - RNA, 8 nt, Artificial Sequence
  source: /note="Description of Artificial Sequence: Synthetic oligonucleotide"
  source: /note="RNA"
  modified_base (2)..(2): 5-methyl modified nucleotide
  modified_base (6)..(6): 5-methyl modified nucleotide
  modified_base (7)..(7): 5-methyl bicyclic nucleic acid
  modified_base (8)..(8): bicyclic nucleic acid (BNA)
ucugucca

SEQ ID NO: 19049 - DNA, 17 bp, Artificial Sequence
  source: /note="Description of Artificial Sequence: Synthetic oligonucleotide"
  source: /note="Description of Combined DNA/RNA Molecule: Synthetic oligonucleotide"
  source: /note="DNA/RNA"
  modified_base (1)..(1): 5-methyl modified nucleotide
  modified_base (5)..(5): 5-methyl modified nucleotide
  modified_base (6)..(6): 5-methyl modified nucleotide
  modified_base (10)..(10): 5-methyl modified nucleotide
  modified_base (11)..(11): 5-methyl modified nucleotide
  modified_base (12)..(12): 5-methyl modified nucleotide
  modified_base (16)..(16): bicyclic nucleic acid (BNA)
  modified_base (17)..(17): bicyclic nucleic acid (BNA)
cuguccaagcccggutg

SEQ ID NO: 19050 - DNA, 16 bp, Artificial Sequence
  source: /note="Description of Artificial Sequence: Synthetic oligonucleotide"
  source: /note="Description of Combined DNA/RNA Molecule: Synthetic oligonucleotide"
  source: /note="DNA/RNA"
  modified_base (1)..(1): 5-methyl modified nucleotide
  modified_base (5)..(5): 5-methyl modified nucleotide
  modified_base (6)..(6): 5-methyl modified nucleotide
  modified_base (10)..(10): 5-methyl modified nucleotide
  modified_base (11)..(11): 5-methyl modified nucleotide
  modified_base (12)..(12): 5-methyl modified nucleotide
  modified_base (15)..(15): bicyclic nucleic acid (BNA)
  modified_base (16)..(16): bicyclic nucleic acid (BNA)
cuguccaagcccggtt

SEQ ID NO: 19051 - DNA, 15 bp, Artificial Sequence
  source: /note="Description of Artificial Sequence: Synthetic oligonucleotide"
  source: /note="Description of Combined DNA/RNA Molecule: Synthetic oligonucleotide"
  source: /note="DNA/RNA"
  modified_base (1)..(1): 5-methyl modified nucleotide
  modified_base (5)..(5): 5-methyl modified nucleotide
  modified_base (6)..(6): 5-methyl modified nucleotide
  modified_base (10)..(10): 5-methyl modified nucleotide
  modified_base (11)..(11): 5-methyl modified nucleotide
  modified_base (12)..(12): 5-methyl modified nucleotide
  modified_base (14)..(14): bicyclic nucleic acid (BNA)
  modified_base (15)..(15): bicyclic nucleic acid (BNA)
cuguccaagcccggt

SEQ ID NO: 19052 - RNA, 14 nt, Artificial Sequence
  source: /note="Description of Artificial Sequence: Synthetic oligonucleotide"
  source: /note="RNA"
  modified_base (1)..(1): 5-methyl modified nucleotide
  modified_base (5)..(5): 5-methyl modified nucleotide
  modified_base (6)..(6): 5-methyl modified nucleotide
  modified_base (10)..(10): 5-methyl modified nucleotide
  modified_base (11)..(11): 5-methyl modified nucleotide
  modified_base (12)..(12): 5-methyl modified nucleotide
  modified_base (13)..(13): bicyclic nucleic acid (BNA)
  modified_base (14)..(14): bicyclic nucleic acid (BNA)
cuguccaagcccgg

SEQ ID NO: 19053 - RNA, 13 nt, Artificial Sequence
  source: /note="Description of Artificial Sequence: Synthetic oligonucleotide"
  source: /note="RNA"
  modified_base (1)..(1): 5-methyl modified nucleotide
  modified_base (5)..(5): 5-methyl modified nucleotide
  modified_base (6)..(6): 5-methyl modified nucleotide
  modified_base (10)..(10): 5-methyl modified nucleotide
  modified_base (11)..(11): 5-methyl modified nucleotide
  modified_base (12)..(12): 5-methyl bicyclic nucleic acid
  modified_base (13)..(13): bicyclic nucleic acid (BNA)
cuguccaagcccg

SEQ ID NO: 19054 - RNA, 12 nt, Artificial Sequence
  source: /note="Description of Artificial Sequence: Synthetic oligonucleotide"
  source: /note="RNA"
  modified_base (1)..(1): 5-methyl modified nucleotide
  modified_base (5)..(5): 5-methyl modified nucleotide
  modified_base (6)..(6): 5-methyl modified nucleotide
  modified_base (10)..(10): 5-methyl modified nucleotide
  modified_base (11)..(11): 5-methyl bicyclic nucleic acid
  modified_base (12)..(12): 5-methyl bicyclic nucleic acid
cuguccaagccc

SEQ ID NO: 19055 - RNA, 11 nt, Artificial Sequence
  source: /note="Description of Artificial Sequence: Synthetic oligonucleotide"
  source: /note="RNA"
  modified_base (1)..(1): 5-methyl modified nucleotide
  modified_base (5)..(5): 5-methyl modified nucleotide
  modified_base (6)..(6): 5-methyl modified nucleotide
  modified_base (10)..(10): 5-methyl bicyclic nucleic acid
  modified_base (11)..(11): 5-methyl bicyclic nucleic acid
cuguccaagcc

SEQ ID NO: 19056 - RNA, 10 nt, Artificial Sequence
  source: /note="Description of Artificial Sequence: Synthetic oligonucleotide"
  source: /note="RNA"
  modified_base (1)..(1): 5-methyl modified nucleotide
  modified_base (5)..(5): 5-methyl modified nucleotide
  modified_base (6)..(6): 5-methyl modified nucleotide
  modified_base (9)..(9): bicyclic nucleic acid (BNA)
  modified_base (10)..(10): 5-methyl bicyclic nucleic acid
cuguccaagc

SEQ ID NO: 19057 - RNA, 9 nt, Artificial Sequence
  source: /note="Description of Artificial Sequence: Synthetic oligonucleotide"
  source: /note="RNA"
  modified_base (1)..(1): 5-methyl modified nucleotide
  modified_base (5)..(5): 5-methyl modified nucleotide
  modified_base (6)..(6): 5-methyl modified nucleotide
  modified_base (8)..(8): bicyclic nucleic acid (BNA)
  modified_base (9)..(9): bicyclic nucleic acid (BNA)
cuguccaag

SEQ ID NO: 19058 - RNA, 8 nt, Artificial Sequence
  source: /note="Description of Artificial Sequence: Synthetic oligonucleotide"
  source: /note="RNA"
  modified_base (1)..(1): 5-methyl modified nucleotide
  modified_base (5)..(5): 5-methyl modified nucleotide
  modified_base (6)..(6): 5-methyl modified nucleotide
  modified_base (7)..(7): bicyclic nucleic acid (BNA)
  modified_base (8)..(8): bicyclic nucleic acid (BNA)
cuguccaa

SEQ ID NO: 19059 - DNA, 20 bp, Artificial Sequence
  source: /note="Description of Artificial Sequence: Synthetic oligonucleotide"
  source: /note="Description of Combined DNA/RNA Molecule: Synthetic oligonucleotide"
  source: /note="DNA/RNA"
  modified_base (4)..(4): 5-methyl modified nucleotide
  modified_base (8)..(8): 5-methyl modified nucleotide
  modified_base (9)..(9): 5-methyl modified nucleotide
  modified_base (13)..(13): 5-methyl modified nucleotide
  modified_base (14)..(14): 5-methyl modified nucleotide
  modified_base (15)..(15): 5-methyl modified nucleotide
  modified_base (19)..(19): bicyclic nucleic acid (BNA)
  modified_base (20)..(20): bicyclic nucleic acid (BNA)
guucuguccaagcccggutg

SEQ ID NO: 19060 - DNA, 19 bp, Artificial Sequence
  source: /note="Description of Artificial Sequence: Synthetic oligonucleotide"
  source: /note="Description of Combined DNA/RNA Molecule: Synthetic oligonucleotide"
  source: /note="DNA/RNA"
  modified_base (4)..(4): 5-methyl modified nucleotide
  modified_base (8)..(8): 5-methyl modified nucleotide
  modified_base (9)..(9): 5-methyl modified nucleotide
  modified_base (13)..(13): 5-methyl modified nucleotide
  modified_base (14)..(14): 5-methyl modified nucleotide
  modified_base (15)..(15): 5-methyl modified nucleotide
  modified_base (18)..(18): bicyclic nucleic acid (BNA)
  modified_base (19)..(19): bicyclic nucleic acid (BNA)
guucuguccaagcccggtt

SEQ ID NO: 19061 - DNA, 18 bp, Artificial Sequence
  source: /note="Description of Artificial Sequence: Synthetic oligonucleotide"
  source: /note="Description of Combined DNA/RNA Molecule: Synthetic oligonucleotide"
  source: /note="DNA/RNA"
  modified_base (4)..(4): 5-methyl modified nucleotide
  modified_base (8)..(8): 5-methyl modified nucleotide
  modified_base (9)..(9): 5-methyl modified nucleotide
  modified_base (13)..(13): 5-methyl modified nucleotide
  modified_base (14)..(14): 5-methyl modified nucleotide
  modified_base (15)..(15): 5-methyl modified nucleotide
  modified_base (17)..(17): bicyclic nucleic acid (BNA)
  modified_base (18)..(18): bicyclic nucleic acid (BNA)
guucuguccaagcccggt

SEQ ID NO: 19062 - RNA, 17 nt, Artificial Sequence
  source: /note="Description of Artificial Sequence: Synthetic oligonucleotide"
  source: /note="RNA"
  modified_base (4)..(4): 5-methyl modified nucleotide
  modified_base (8)..(8): 5-methyl modified nucleotide
  modified_base (9)..(9): 5-methyl modified nucleotide
  modified_base (13)..(13): 5-methyl modified nucleotide
  modified_base (14)..(14): 5-methyl modified nucleotide
  modified_base (15)..(15): 5-methyl modified nucleotide
  modified_base (16)..(16): bicyclic nucleic acid (BNA)
  modified_base (17)..(17): bicyclic nucleic acid (BNA)
guucuguccaagcccgg

SEQ ID NO: 19063 - RNA, 16 nt, Artificial Sequence
  source: /note="Description of Artificial Sequence: Synthetic oligonucleotide"
  source: /note="RNA"
  modified_base (4)..(4): 5-methyl modified nucleotide
  modified_base (8)..(8): 5-methyl modified nucleotide
  modified_base (9)..(9): 5-methyl modified nucleotide
  modified_base (13)..(13): 5-methyl modified nucleotide
  modified_base (14)..(14): 5-methyl modified nucleotide
  modified_base (15)..(15): 5-methyl bicyclic nucleic acid
  modified_base (16)..(16): bicyclic nucleic acid (BNA)
guucuguccaagcccg

SEQ ID NO: 19064 - RNA, 15 nt, Artificial Sequence
  source: /note="Description of Artificial Sequence: Synthetic oligonucleotide"
  source: /note="RNA"
  modified_base (4)..(4): 5-methyl modified nucleotide
  modified_base (8)..(8): 5-methyl modified nucleotide
  modified_base (9)..(9): 5-methyl modified nucleotide
  modified_base (13)..(13): 5-methyl modified nucleotide
  modified_base (14)..(14): 5-methyl bicyclic nucleic acid
  modified_base (15)..(15): 5-methyl bicyclic nucleic acid
guucuguccaagccc

SEQ ID NO: 19065 - RNA, 14 nt, Artificial Sequence
  source: /note="Description of Artificial Sequence: Synthetic oligonucleotide"
  source: /note="RNA"
  modified_base (4)..(4): 5-methyl modified nucleotide
  modified_base (8)..(8): 5-methyl modified nucleotide
  modified_base (9)..(9): 5-methyl modified nucleotide
  modified_base (13)..(13): 5-methyl bicyclic nucleic acid
  modified_base (14)..(14): 5-methyl bicyclic nucleic acid
guucuguccaagcc

SEQ ID NO: 19066 - RNA, 13 nt, Artificial Sequence
  source: /note="Description of Artificial Sequence: Synthetic oligonucleotide"
  source: /note="RNA"
  modified_base (4)..(4): 5-methyl modified nucleotide
  modified_base (8)..(8): 5-methyl modified nucleotide
  modified_base (9)..(9): 5-methyl modified nucleotide
  modified_base (12)..(12): bicyclic nucleic acid (BNA)
  modified_base (13)..(13): 5-methyl bicyclic nucleic acid
guucuguccaagc

SEQ ID NO: 19067 - RNA, 12 nt, Artificial Sequence
  source: /note="Description of Artificial Sequence: Synthetic oligonucleotide"
  source: /note="RNA"
  modified_base (4)..(4): 5-methyl modified nucleotide
  modified_base (8)..(8): 5-methyl modified nucleotide
  modified_base (9)..(9): 5-methyl modified nucleotide
  modified_base (11)..(11): bicyclic nucleic acid (BNA)
  modified_base (12)..(12): bicyclic nucleic acid (BNA)
guucuguccaag

SEQ ID NO: 19068 - RNA, 11 nt, Artificial Sequence
  source: /note="Description of Artificial Sequence: Synthetic oligonucleotide"
  source: /note="RNA"
  modified_base (4)..(4): 5-methyl modified nucleotide
  modified_base (8)..(8): 5-methyl modified nucleotide
  modified_base (9)..(9): 5-methyl modified nucleotide
  modified_base (10)..(10): bicyclic nucleic acid (BNA)
  modified_base (11)..(11): bicyclic nucleic acid (BNA)
guucuguccaa

SEQ ID NO: 19069 - RNA, 10 nt, Artificial Sequence
  source: /note="Description of Artificial Sequence: Synthetic oligonucleotide"
  source: /note="RNA"
  modified_base (4)..(4): 5-methyl modified nucleotide
  modified_base (8)..(8): 5-methyl modified nucleotide
  modified_base (9)..(9): 5-methyl bicyclic nucleic acid
  modified_base (10)..(10): bicyclic nucleic acid (BNA)
guucugucca

SEQ ID NO: 19070 - RNA, 9 nt, Artificial Sequence
  source: /note="Description of Artificial Sequence: Synthetic oligonucleotide"
  source: /note="RNA"
  modified_base (4)..(4): 5-methyl modified nucleotide
  modified_base (8)..(8): 5-methyl bicyclic nucleic acid
  modified_base (9)..(9): 5-methyl bicyclic nucleic acid
guucugucc

SEQ ID NO: 19071 - DNA, 8 bp, Artificial Sequence
  source: /note="Description of Artificial Sequence: Synthetic oligonucleotide"
  source: /note="Description of Combined DNA/RNA Molecule: Synthetic oligonucleotide"
  source: /note="DNA/RNA"
  modified_base (4)..(4): 5-methyl modified nucleotide
  modified_base (7)..(7): bicyclic nucleic acid (BNA)
  modified_base (8)..(8): 5-methyl bicyclic nucleic acid
guucugtc

SEQ ID NO: 19072 - DNA, 20 bp, Artificial Sequence
  source: /note="Description of Artificial Sequence: Synthetic oligonucleotide"
  source: /note="Description of Combined DNA/RNA Molecule: Synthetic oligonucleotide"
  source: /note="DNA/RNA"
  modified_base (5)..(5): 5-methyl modified nucleotide
  modified_base (9)..(9): 5-methyl modified nucleotide
  modified_base (10)..(10): 5-methyl modified nucleotide
  modified_base (14)..(14): 5-methyl modified nucleotide
  modified_base (15)..(15): 5-methyl modified nucleotide
  modified_base (16)..(16): 5-methyl modified nucleotide
  modified_base (19)..(19): bicyclic nucleic acid (BNA)
  modified_base (20)..(20): bicyclic nucleic acid (BNA)
aguucuguccaagcccggtt

SEQ ID NO: 19073 - DNA, 19 bp, Artificial Sequence
  source: /note="Description of Artificial Sequence: Synthetic oligonucleotide"
  source: /note="Description of Combined DNA/RNA Molecule: Synthetic oligonucleotide"
  source: /note="DNA/RNA"
  modified_base (5)..(5): 5-methyl modified nucleotide
  modified_base (9)..(9): 5-methyl modified nucleotide
  modified_base (10)..(10): 5-methyl modified nucleotide
  modified_base (14)..(14): 5-methyl modified nucleotide
  modified_base (15)..(15): 5-methyl modified nucleotide
  modified_base (16)..(16): 5-methyl modified nucleotide
  modified_base (18)..(18): bicyclic nucleic acid (BNA)
  modified_base (19)..(19): bicyclic nucleic acid (BNA)
aguucuguccaagcccggt

SEQ ID NO: 19074 - RNA, 18 nt, Artificial Sequence
  source: /note="Description of Artificial Sequence: Synthetic oligonucleotide"
  source: /note="RNA"
  modified_base (5)..(5): 5-methyl modified nucleotide
  modified_base (9)..(9): 5-methyl modified nucleotide
  modified_base (10)..(10): 5-methyl modified nucleotide
  modified_base (14)..(14): 5-methyl modified nucleotide
  modified_base (15)..(15): 5-methyl modified nucleotide
  modified_base (16)..(16): 5-methyl modified nucleotide
  modified_base (17)..(17): bicyclic nucleic acid (BNA)
  modified_base (18)..(18): bicyclic nucleic acid (BNA)
aguucuguccaagcccgg

SEQ ID NO: 19075 - RNA, 17 nt, Artificial Sequence
  source: /note="Description of Artificial Sequence: Synthetic oligonucleotide"
  source: /note="RNA"
  modified_base (5)..(5): 5-methyl modified nucleotide
  modified_base (9)..(9): 5-methyl modified nucleotide
  modified_base (10)..(10): 5-methyl modified nucleotide
  modified_base (14)..(14): 5-methyl modified nucleotide
  modified_base (15)..(15): 5-methyl modified nucleotide
  modified_base (16)..(16): 5-methyl bicyclic nucleic acid
  modified_base (17)..(17): bicyclic nucleic acid (BNA)
aguucuguccaagcccg

SEQ ID NO: 19076 - RNA, 16 nt, Artificial Sequence
  source: /note="Description of Artificial Sequence: Synthetic oligonucleotide"
  source: /note="RNA"
  modified_base (5)..(5): 5-methyl modified nucleotide
  modified_base (9)..(9): 5-methyl modified nucleotide
  modified_base (10)..(10): 5-methyl modified nucleotide
  modified_base (14)..(14): 5-methyl modified nucleotide
  modified_base (15)..(15): 5-methyl bicyclic nucleic acid
  modified_base (16)..(16): 5-methyl bicyclic nucleic acid
aguucuguccaagccc

SEQ ID NO: 19077 - RNA, 15 nt, Artificial Sequence
  source: /note="Description of Artificial Sequence: Synthetic oligonucleotide"
  source: /note="RNA"
  modified_base (5)..(5): 5-methyl modified nucleotide
  modified_base (9)..(9): 5-methyl modified nucleotide
  modified_base (10)..(10): 5-methyl modified nucleotide
  modified_base (14)..(14): 5-methyl bicyclic nucleic acid
  modified_base (15)..(15): 5-methyl bicyclic nucleic acid
aguucuguccaagcc

SEQ ID NO: 19078 - RNA, 14 nt, Artificial Sequence
  source: /note="Description of Artificial Sequence: Synthetic oligonucleotide"
  source: /note="RNA"
  modified_base (5)..(5): 5-methyl modified nucleotide
  modified_base (9)..(9): 5-methyl modified nucleotide
  modified_base (10)..(10): 5-methyl modified nucleotide
  modified_base (13)..(13): bicyclic nucleic acid (BNA)
  modified_base (14)..(14): 5-methyl bicyclic nucleic acid
aguucuguccaagc

SEQ ID NO: 19079 - RNA, 13 nt, Artificial Sequence
  source: /note="Description of Artificial Sequence: Synthetic oligonucleotide"
  source: /note="RNA"
  modified_base (5)..(5): 5-methyl modified nucleotide
  modified_base (9)..(9): 5-methyl modified nucleotide
  modified_base (10)..(10): 5-methyl modified nucleotide
  modified_base (12)..(12): bicyclic nucleic acid (BNA)
  modified_base (13)..(13): bicyclic nucleic acid (BNA)
aguucuguccaag

SEQ ID NO: 19080 - RNA, 12 nt, Artificial Sequence
  source: /note="Description of Artificial Sequence: Synthetic oligonucleotide"
  source: /note="RNA"
  modified_base (5)..(5): 5-methyl modified nucleotide
  modified_base (9)..(9): 5-methyl modified nucleotide
  modified_base (10)..(10): 5-methyl modified nucleotide
  modified_base (11)..(11): bicyclic nucleic acid (BNA)
  modified_base (12)..(12): bicyclic nucleic acid (BNA)
aguucuguccaa

SEQ ID NO: 19081 - RNA, 11 nt, Artificial Sequence
  source: /note="Description of Artificial Sequence: Synthetic oligonucleotide"
  source: /note="RNA"
  modified_base (5)..(5): 5-methyl modified nucleotide
  modified_base (9)..(9): 5-methyl modified nucleotide
  modified_base (10)..(10): 5-methyl bicyclic nucleic acid
  modified_base (11)..(11): bicyclic nucleic acid (BNA)
aguucugucca

SEQ ID NO: 19082 - RNA, 10 nt, Artificial Sequence
  source: /note="Description of Artificial Sequence: Synthetic oligonucleotide"
  source: /note="RNA"
  modified_base (5)..(5): 5-methyl modified nucleotide
  modified_base (9)..(9): 5-methyl bicyclic nucleic acid
  modified_base (10)..(10): 5-methyl bicyclic nucleic acid
aguucugucc

SEQ ID NO: 19083 - DNA, 9 bp, Artificial Sequence
  source: /note="Description of Artificial Sequence: Synthetic oligonucleotide"
  source: /note="Description of Combined DNA/RNA Molecule: Synthetic oligonucleotide"
  source: /note="DNA/RNA"
  modified_base (5)..(5): 5-methyl modified nucleotide
  modified_base (8)..(8): bicyclic nucleic acid (BNA)
  modified_base (9)..(9): 5-methyl bicyclic nucleic acid
aguucugtc

SEQ ID NO: 19084 - DNA, 8 bp, Artificial Sequence
  source: /note="Description of Artificial Sequence: Synthetic oligonucleotide"
  source: /note="Description of Combined DNA/RNA Molecule: Synthetic oligonucleotide"
  source: /note="DNA/RNA"
  modified_base (5)..(5): 5-methyl modified nucleotide
  modified_base (7)..(7): bicyclic nucleic acid (BNA)
  modified_base (8)..(8): bicyclic nucleic acid (BNA)
aguucugt

SEQ ID NO: 19085 - DNA, 20 bp, Artificial Sequence
  source: /note="Description of Artificial Sequence: Synthetic oligonucleotide"
  source: /note="Description of Combined DNA/RNA Molecule: Synthetic oligonucleotide"
  source: /note="DNA/RNA"
  modified_base (6)..(6): 5-methyl modified nucleotide
  modified_base (10)..(10): 5-methyl modified nucleotide
  modified_base (11)..(11): 5-methyl modified nucleotide
  modified_base (15)..(15): 5-methyl modified nucleotide
  modified_base (16)..(16): 5-methyl modified nucleotide
  modified_base (17)..(17): 5-methyl modified nucleotide
  modified_base (19)..(19): bicyclic nucleic acid (BNA)
  modified_base (20)..(20): bicyclic nucleic acid (BNA)
aaguucuguccaagcccggt

SEQ ID NO: 19086 - RNA, 19 nt, Artificial Sequence
  source: /note="Description of Artificial Sequence: Synthetic oligonucleotide"
  source: /note="RNA"
  modified_base (6)..(6): 5-methyl modified nucleotide
  modified_base (10)..(10): 5-methyl modified nucleotide
  modified_base (11)..(11): 5-methyl modified nucleotide
  modified_base (15)..(15): 5-methyl modified nucleotide
  modified_base (16)..(16): 5-methyl modified nucleotide
  modified_base (17)..(17): 5-methyl modified nucleotide
  modified_base (18)..(18): bicyclic nucleic acid (BNA)
  modified_base (19)..(19): bicyclic nucleic acid (BNA)
aaguucuguccaagcccgg

SEQ ID NO: 19087 - RNA, 18 nt, Artificial Sequence
  source: /note="Description of Artificial Sequence: Synthetic oligonucleotide"
  source: /note="RNA"
  modified_base (6)..(6): 5-methyl modified nucleotide
  modified_base (10)..(10): 5-methyl modified nucleotide
  modified_base (11)..(11): 5-methyl modified nucleotide
  modified_base (15)..(15): 5-methyl modified nucleotide
  modified_base (16)..(16): 5-methyl modified nucleotide
  modified_base (17)..(17): 5-methyl bicyclic nucleic acid
  modified_base (18)..(18): bicyclic nucleic acid (BNA)
aaguucuguccaagcccg

SEQ ID NO: 19088 - RNA, 17 nt, Artificial Sequence
  source: /note="Description of Artificial Sequence: Synthetic oligonucleotide"
  source: /note="RNA"
  modified_base (6)..(6): 5-methyl modified nucleotide
  modified_base (10)..(10): 5-methyl modified nucleotide
  modified_base (11)..(11): 5-methyl modified nucleotide
  modified_base (15)..(15): 5-methyl modified nucleotide
  modified_base (16)..(16): 5-methyl bicyclic nucleic acid
  modified_base (17)..(17): 5-methyl bicyclic nucleic acid
aaguucuguccaagccc

SEQ ID NO: 19089 - RNA, 16 nt, Artificial Sequence
  source: /note="Description of Artificial Sequence: Synthetic oligonucleotide"
  source: /note="RNA"
  modified_base (6)..(6): 5-methyl modified nucleotide
  modified_base (10)..(10): 5-methyl modified nucleotide
  modified_base (11)..(11): 5-methyl modified nucleotide
  modified_base (15)..(15): 5-methyl bicyclic nucleic acid
  modified_base (16)..(16): 5-methyl bicyclic nucleic acid
aaguucuguccaagcc

SEQ ID NO: 19090 - RNA, 15 nt, Artificial Sequence
  source: /note="Description of Artificial Sequence: Synthetic oligonucleotide"
  source: /note="RNA"
  modified_base (6)..(6): 5-methyl modified nucleotide
  modified_base (10)..(10): 5-methyl modified nucleotide
  modified_base (11)..(11): 5-methyl modified nucleotide
  modified_base (14)..(14): bicyclic nucleic acid (BNA)
  modified_base (15)..(15): 5-methyl bicyclic nucleic acid
aaguucuguccaagc

SEQ ID NO: 19091 - RNA, 14 nt, Artificial Sequence
  source: /note="Description of Artificial Sequence: Synthetic oligonucleotide"
  source: /note="RNA"
  modified_base (6)..(6): 5-methyl modified nucleotide
  modified_base (10)..(10): 5-methyl modified nucleotide
  modified_base (11)..(11): 5-methyl modified nucleotide
  modified_base (13)..(13): bicyclic nucleic acid (BNA)
  modified_base (14)..(14): bicyclic nucleic acid (BNA)
aaguucuguccaag

SEQ ID NO: 19092 - RNA, 13 nt, Artificial Sequence
  source: /note="Description of Artificial Sequence: Synthetic oligonucleotide"
  source: /note="RNA"
  modified_base (6)..(6): 5-methyl modified nucleotide
  modified_base (10)..(10): 5-methyl modified nucleotide
  modified_base (11)..(11): 5-methyl modified nucleotide
  modified_base (12)..(12): bicyclic nucleic acid (BNA)
  modified_base (13)..(13): bicyclic nucleic acid (BNA)
aaguucuguccaa

SEQ ID NO: 19093 - RNA, 12 nt, Artificial Sequence
  source: /note="Description of Artificial Sequence: Synthetic oligonucleotide"
  source: /note="RNA"
  modified_base (6)..(6): 5-methyl modified nucleotide
  modified_base (10)..(10): 5-methyl modified nucleotide
  modified_base (11)..(11): 5-methyl bicyclic nucleic acid
  modified_base (12)..(12): bicyclic nucleic acid (BNA)
aaguucugucca

SEQ ID NO: 19094 - RNA, 11 nt, Artificial Sequence
  source: /note="Description of Artificial Sequence: Synthetic oligonucleotide"
  source: /note="RNA"
  modified_base (6)..(6): 5-methyl modified nucleotide
  modified_base (10)..(10): 5-methyl bicyclic nucleic acid
  modified_base (11)..(11): 5-methyl bicyclic nucleic acid
aaguucugucc

SEQ ID NO: 19095 - DNA, 10 bp, Artificial Sequence
  source: /note="Description of Artificial Sequence: Synthetic oligonucleotide"
  source: /note="Description of Combined DNA/RNA Molecule: Synthetic oligonucleotide"
  source: /note="DNA/RNA"
  modified_base (6)..(6): 5-methyl modified nucleotide
  modified_base (9)..(9): bicyclic nucleic acid (BNA)
  modified_base (10)..(10): 5-methyl bicyclic nucleic acid
aaguucugtc

SEQ ID NO: 19096 - DNA, 9 bp, Artificial Sequence
  source: /note="Description of Artificial Sequence: Synthetic oligonucleotide"
  source: /note="Description of Combined DNA/RNA Molecule: Synthetic oligonucleotide"
  source: /note="DNA/RNA"
  modified_base (6)..(6): 5-methyl modified nucleotide
  modified_base (8)..(8): bicyclic nucleic acid (BNA)
  modified_base (9)..(9): bicyclic nucleic acid (BNA)
aaguucugt

SEQ ID NO: 19097 - DNA, 8 bp, Artificial Sequence
  source: /note="Description of Artificial Sequence: Synthetic oligonucleotide"
  source: /note="Description of Combined DNA/RNA Molecule: Synthetic oligonucleotide"
  source: /note="DNA/RNA"
  modified_base (6)..(6): 5-methyl modified nucleotide
  modified_base (7)..(7): bicyclic nucleic acid (BNA)
  modified_base (8)..(8): bicyclic nucleic acid (BNA)
aaguuctg

SEQ ID NO: 19098 - RNA, 20 nt, Artificial Sequence
  source: /note="Description of Artificial Sequence: Synthetic oligonucleotide"
  source: /note="RNA"
  modified_base (7)..(7): 5-methyl modified nucleotide
  modified_base (11)..(11): 5-methyl modified nucleotide
  modified_base (12)..(12): 5-methyl modified nucleotide
  modified_base (16)..(16): 5-methyl modified nucleotide
  modified_base (17)..(17): 5-methyl modified nucleotide
  modified_base (18)..(18): 5-methyl modified nucleotide
  modified_base (19)..(19): bicyclic nucleic acid (BNA)
  modified_base (20)..(20): bicyclic nucleic acid (BNA)
uaaguucuguccaagcccgg

SEQ ID NO: 19099 - RNA, 19 nt, Artificial Sequence
  source: /note="Description of Artificial Sequence: Synthetic oligonucleotide"
  source: /note="RNA"
  modified_base (7)..(7): 5-methyl modified nucleotide
  modified_base (11)..(11): 5-methyl modified nucleotide
  modified_base (12)..(12): 5-methyl modified nucleotide
  modified_base (16)..(16): 5-methyl modified nucleotide
  modified_base (17)..(17): 5-methyl modified nucleotide
  modified_base (18)..(18): 5-methyl bicyclic nucleic acid
  modified_base (19)..(19): bicyclic nucleic acid (BNA)
uaaguucuguccaagcccg

SEQ ID NO: 19100 - RNA, 18 nt, Artificial Sequence
  source: /note="Description of Artificial Sequence: Synthetic oligonucleotide"
  source: /note="RNA"
  modified_base (7)..(7): 5-methyl modified nucleotide
  modified_base (11)..(11): 5-methyl modified nucleotide
  modified_base (12)..(12): 5-methyl modified nucleotide
  modified_base (16)..(16): 5-methyl modified nucleotide
  modified_base (17)..(17): 5-methyl bicyclic nucleic acid
  modified_base (18)..(18): 5-methyl bicyclic nucleic acid
uaaguucuguccaagccc

SEQ ID NO: 19101 - RNA, 17 nt, Artificial Sequence
  source: /note="Description of Artificial Sequence: Synthetic oligonucleotide"
  source: /note="RNA"
  modified_base (7)..(7): 5-methyl modified nucleotide
  modified_base (11)..(11): 5-methyl modified nucleotide
  modified_base (12)..(12): 5-methyl modified nucleotide
  modified_base (16)..(16): 5-methyl bicyclic nucleic acid
  modified_base (17)..(17): 5-methyl bicyclic nucleic acid
uaaguucuguccaagcc

SEQ ID NO: 19102 - RNA, 16 nt, Artificial Sequence
  source: /note="Description of Artificial Sequence: Synthetic oligonucleotide"
  source: /note="RNA"
  modified_base (7)..(7): 5-methyl modified nucleotide
  modified_base (11)..(11): 5-methyl modified nucleotide
  modified_base (12)..(12): 5-methyl modified nucleotide
  modified_base (15)..(15): bicyclic nucleic acid (BNA)
  modified_base (16)..(16): 5-methyl bicyclic nucleic acid
uaaguucuguccaagc

SEQ ID NO: 19103 - RNA, 14 nt, Artificial Sequence
  source: /note="Description of Artificial Sequence: Synthetic oligonucleotide"
  source: /note="RNA"
  modified_base (7)..(7): 5-methyl modified nucleotide
  modified_base (11)..(11): 5-methyl modified nucleotide
  modified_base (12)..(12): 5-methyl modified nucleotide
  modified_base (13)..(13): bicyclic nucleic acid (BNA)
  modified_base (14)..(14): bicyclic nucleic acid (BNA)
uaaguucuguccaa

SEQ ID NO: 19104 - RNA, 13 nt, Artificial Sequence
  source: /note="Description of Artificial Sequence: Synthetic oligonucleotide"
  source: /note="RNA"
  modified_base (7)..(7): 5-methyl modified nucleotide
  modified_base (11)..(11): 5-methyl modified nucleotide
  modified_base (12)..(12): 5-methyl bicyclic nucleic acid
  modified_base (13)..(13): bicyclic nucleic acid (BNA)
uaaguucugucca

SEQ ID NO: 19105 - RNA, 12 nt, Artificial Sequence
  source: /note="Description of Artificial Sequence: Synthetic oligonucleotide"
  source: /note="RNA"
  modified_base (7)..(7): 5-methyl modified nucleotide
  modified_base (11)..(11): 5-methyl bicyclic nucleic acid
  modified_base (12)..(12): 5-methyl bicyclic nucleic acid
uaaguucugucc

SEQ ID NO: 19106 - DNA, 11 bp, Artificial Sequence
  source: /note="Description of Artificial Sequence: Synthetic oligonucleotide"
  source: /note="Description of Combined DNA/RNA Molecule: Synthetic oligonucleotide"
  source: /note="DNA/RNA"
  modified_base (7)..(7): 5-methyl modified nucleotide
  modified_base (10)..(10): bicyclic nucleic acid (BNA)
  modified_base (11)..(11): 5-methyl bicyclic nucleic acid
uaaguucugtc

SEQ ID NO: 19107 - DNA, 10 bp, Artificial Sequence
  source: /note="Description of Artificial Sequence: Synthetic oligonucleotide"
  source: /note="Description of Combined DNA/RNA Molecule: Synthetic oligonucleotide"
  source: /note="DNA/RNA"
  modified_base (7)..(7): 5-methyl modified nucleotide
  modified_base (9)..(9): bicyclic nucleic acid (BNA)
  modified_base (10)..(10): bicyclic nucleic acid (BNA)
uaaguucugt

SEQ ID NO: 19108 - DNA, 9 bp, Artificial Sequence
  source: /note="Description of Artificial Sequence: Synthetic oligonucleotide"
  source: /note="Description of Combined DNA/RNA Molecule: Synthetic oligonucleotide"
  source: /note="DNA/RNA"
  modified_base (7)..(7): 5-methyl modified nucleotide
  modified_base (8)..(8): bicyclic nucleic acid (BNA)
  modified_base (9)..(9): bicyclic nucleic acid (BNA)
uaaguuctg

SEQ ID NO: 19109 - DNA, 8 bp, Artificial Sequence
  source: /note="Description of Artificial Sequence: Synthetic oligonucleotide"
  source: /note="Description of Combined DNA/RNA Molecule: Synthetic oligonucleotide"
  source: /note="DNA/RNA"
  modified_base (7)..(7): 5-methyl bicyclic nucleic acid
  modified_base (8)..(8): bicyclic nucleic acid (BNA)
uaaguuct

SEQ ID NO: 19110 - RNA, 20 nt, Artificial Sequence
  source: /note="Description of Artificial Sequence: Synthetic oligonucleotide"
  source: /note="RNA"
  modified_base (8)..(8): 5-methyl modified nucleotide
  modified_base (12)..(12): 5-methyl modified nucleotide
  modified_base (13)..(13): 5-methyl modified nucleotide
  modified_base (17)..(17): 5-methyl modified nucleotide
  modified_base (18)..(18): 5-methyl modified nucleotide
  modified_base (19)..(19): 5-methyl bicyclic nucleic acid
  modified_base (20)..(20): bicyclic nucleic acid (BNA)
guaaguucuguccaagcccg

SEQ ID NO: 19111 - RNA, 19 nt, Artificial Sequence
  source: /note="Description of Artificial Sequence: Synthetic oligonucleotide"
  source: /note="RNA"
  modified_base (8)..(8): 5-methyl modified nucleotide
  modified_base (12)..(12): 5-methyl modified nucleotide
  modified_base (13)..(13): 5-methyl modified nucleotide
  modified_base (17)..(17): 5-methyl modified nucleotide
  modified_base (18)..(18): 5-methyl bicyclic nucleic acid
  modified_base (19)..(19): 5-methyl bicyclic nucleic acid
guaaguucuguccaagccc

SEQ ID NO: 19112 - RNA, 17 nt, Artificial Sequence
  source: /note="Description of Artificial Sequence: Synthetic oligonucleotide"
  source: /note="RNA"
  modified_base (8)..(8): 5-methyl modified nucleotide
  modified_base (12)..(12): 5-methyl modified nucleotide
  modified_base (13)..(13): 5-methyl modified nucleotide
  modified_base (16)..(16): bicyclic nucleic acid (BNA)
  modified_base (17)..(17): 5-methyl bicyclic nucleic acid
guaaguucuguccaagc

SEQ ID NO: 19113 - RNA, 16 nt, Artificial Sequence
  source: /note="Description of Artificial Sequence: Synthetic oligonucleotide"
  source: /note="RNA"
  modified_base (8)..(8): 5-methyl modified nucleotide
  modified_base (12)..(12): 5-methyl modified nucleotide
  modified_base (13)..(13): 5-methyl modified nucleotide
  modified_base (15)..(15): bicyclic nucleic acid (BNA)
  modified_base (16)..(16): bicyclic nucleic acid (BNA)
guaaguucuguccaag

SEQ ID NO: 19114 - RNA, 15 nt, Artificial Sequence
  source: /note="Description of Artificial Sequence: Synthetic oligonucleotide"
  source: /note="RNA"
  modified_base (8)..(8): 5-methyl modified nucleotide
  modified_base (12)..(12): 5-methyl modified nucleotide
  modified_base (13)..(13): 5-methyl modified nucleotide
  modified_base (14)..(14): bicyclic nucleic acid (BNA)
  modified_base (15)..(15): bicyclic nucleic acid (BNA)
guaaguucuguccaa

SEQ ID NO: 19115 - RNA, 14 nt, Artificial Sequence
  source: /note="Description of Artificial Sequence: Synthetic oligonucleotide"
  source: /note="RNA"
  modified_base (8)..(8): 5-methyl modified nucleotide
  modified_base (12)..(12): 5-methyl modified nucleotide
  modified_base (13)..(13): 5-methyl bicyclic nucleic acid
  modified_base (14)..(14): bicyclic nucleic acid (BNA)
guaaguucugucca

SEQ ID NO: 19116 - RNA, 13 nt, Artificial Sequence
  source: /note="Description of Artificial Sequence: Synthetic oligonucleotide"
  source: /note="RNA"
  modified_base (8)..(8): 5-methyl modified nucleotide
  modified_base (12)..(12): 5-methyl bicyclic nucleic acid
  modified_base (13)..(13): 5-methyl bicyclic nucleic acid
guaaguucugucc

SEQ ID NO: 19117 - DNA, 12 bp, Artificial Sequence
  source: /note="Description of Artificial Sequence: Synthetic oligonucleotide"
  source: /note="Description of Combined DNA/RNA Molecule: Synthetic oligonucleotide"
  source: /note="DNA/RNA"
  modified_base (8)..(8): 5-methyl modified nucleotide
  modified_base (11)..(11): bicyclic nucleic acid (BNA)
  modified_base (12)..(12): 5-methyl bicyclic nucleic acid
guaaguucugtc

SEQ ID NO: 19118 - DNA, 11 bp, Artificial Sequence
  source: /note="Description of Artificial Sequence: Synthetic oligonucleotide"
  source: /note="Description of Combined DNA/RNA Molecule: Synthetic oligonucleotide"
  source: /note="DNA/RNA"
  modified_base (8)..(8): 5-methyl modified nucleotide
  modified_base (10)..(10): bicyclic nucleic acid (BNA)
  modified_base (11)..(11): bicyclic nucleic acid (BNA)
guaaguucugt

SEQ ID NO: 19119 - DNA, 10 bp, Artificial Sequence
  source: /note="Description of Artificial Sequence: Synthetic oligonucleotide"
  source: /note="Description of Combined DNA/RNA Molecule: Synthetic oligonucleotide"
  source: /note="DNA/RNA"
  modified_base (8)..(8): 5-methyl modified nucleotide
  modified_base (9)..(9): bicyclic nucleic acid (BNA)
  modified_base (10)..(10): bicyclic nucleic acid (BNA)
guaaguuctg

SEQ ID NO: 19120 - DNA, 9 bp, Artificial Sequence
  source: /note="Description of Artificial Sequence: Synthetic oligonucleotide"
  source: /note="Description of Combined DNA/RNA Molecule: Synthetic oligonucleotide"
  source: /note="DNA/RNA"
  modified_base (8)..(8): 5-methyl bicyclic nucleic acid
  modified_base (9)..(9): bicyclic nucleic acid (BNA)
guaaguuct

SEQ ID NO: 19121 - DNA, 8 bp, Artificial Sequence
  source: /note="Description of Artificial Sequence: Synthetic oligonucleotide"
  source: /note="Description of Combined DNA/RNA Molecule: Synthetic oligonucleotide"
  source: /note="DNA/RNA"
  modified_base (7)..(7): bicyclic nucleic acid (BNA)
  modified_base (8)..(8): 5-methyl bicyclic nucleic acid
guaagutc

SEQ ID NO: 19122 - RNA, 20 nt, Artificial Sequence
  source: /note="Description of Artificial Sequence: Synthetic oligonucleotide"
  source: /note="RNA"
  modified_base (9)..(9): 5-methyl modified nucleotide
  modified_base (13)..(13): 5-methyl modified nucleotide
  modified_base (14)..(14): 5-methyl modified nucleotide
  modified_base (18)..(18): 5-methyl modified nucleotide
  modified_base (19)..(19): 5-methyl bicyclic nucleic acid
  modified_base (20)..(20): 5-methyl bicyclic nucleic acid
gguaaguucuguccaagccc

SEQ ID NO: 19123 - RNA, 19 nt, Artificial Sequence
  source: /note="Description of Artificial Sequence: Synthetic oligonucleotide"
  source: /note="RNA"
  modified_base (9)..(9): 5-methyl modified nucleotide
  modified_base (13)..(13): 5-methyl modified nucleotide
  modified_base (14)..(14): 5-methyl modified nucleotide
  modified_base (18)..(18): 5-methyl bicyclic nucleic acid
  modified_base (19)..(19): 5-methyl bicyclic nucleic acid
gguaaguucuguccaagcc

SEQ ID NO: 19124 - RNA, 17 nt, Artificial Sequence
  source: /note="Description of Artificial Sequence: Synthetic oligonucleotide"
  source: /note="RNA"
  modified_base (9)..(9): 5-methyl modified nucleotide
  modified_base (13)..(13): 5-methyl modified nucleotide
  modified_base (14)..(14): 5-methyl modified nucleotide
  modified_base (16)..(16): bicyclic nucleic acid (BNA)
  modified_base (17)..(17): bicyclic nucleic acid (BNA)
gguaaguucuguccaag

SEQ ID NO: 19125 - RNA, 16 nt, Artificial Sequence
  source: /note="Description of Artificial Sequence: Synthetic oligonucleotide"
  source: /note="RNA"
  modified_base (9)..(9): 5-methyl modified nucleotide
  modified_base (13)..(13): 5-methyl modified nucleotide
  modified_base (14)..(14): 5-methyl modified nucleotide
  modified_base (15)..(15): bicyclic nucleic acid (BNA)
  modified_base (16)..(16): bicyclic nucleic acid (BNA)
gguaaguucuguccaa

SEQ ID NO: 19126 - RNA, 15 nt, Artificial Sequence
  source: /note="Description of Artificial Sequence: Synthetic oligonucleotide"
  source: /note="RNA"
  modified_base (9)..(9): 5-methyl modified nucleotide
  modified_base (13)..(13): 5-methyl modified nucleotide
  modified_base (14)..(14): 5-methyl bicyclic nucleic acid
  modified_base (15)..(15): bicyclic nucleic acid (BNA)
gguaaguucugucca

SEQ ID NO: 19127 - RNA, 14 nt, Artificial Sequence
  source: /note="Description of Artificial Sequence: Synthetic oligonucleotide"
  source: /note="RNA"
  modified_base (9)..(9): 5-methyl modified nucleotide
  modified_base (13)..(13): 5-methyl bicyclic nucleic acid
  modified_base (14)..(14): 5-methyl bicyclic nucleic acid
gguaaguucugucc

SEQ ID NO: 19128 - DNA, 13 bp, Artificial Sequence
  source: /note="Description of Artificial Sequence: Synthetic oligonucleotide"
  source: /note="Description of Combined DNA/RNA Molecule: Synthetic oligonucleotide"
  source: /note="DNA/RNA"
  modified_base (9)..(9): 5-methyl modified nucleotide
  modified_base (12)..(12): bicyclic nucleic acid (BNA)
  modified_base (13)..(13): 5-methyl bicyclic nucleic acid
gguaaguucugtc

SEQ ID NO: 19129 - DNA, 12 bp, Artificial Sequence
  source: /note="Description of Artificial Sequence: Synthetic oligonucleotide"
  source: /note="Description of Combined DNA/RNA Molecule: Synthetic oligonucleotide"
  source: /note="DNA/RNA"
  modified_base (9)..(9): 5-methyl modified nucleotide
  modified_base (11)..(11): bicyclic nucleic acid (BNA)
  modified_base (12)..(12): bicyclic nucleic acid (BNA)
gguaaguucugt

SEQ ID NO: 19130 - DNA, 11 bp, Artificial Sequence
  source: /note="Description of Artificial Sequence: Synthetic oligonucleotide"
  source: /note="Description of Combined DNA/RNA Molecule: Synthetic oligonucleotide"
  source: /note="DNA/RNA"
  modified_base (9)..(9): 5-methyl modified nucleotide
  modified_base (10)..(10): bicyclic nucleic acid (BNA)
  modified_base (11)..(11): bicyclic nucleic acid (BNA)
gguaaguuctg

SEQ ID NO: 19131 - DNA, 10 bp, Artificial Sequence
  source: /note="Description of Artificial Sequence: Synthetic oligonucleotide"
  source: /note="Description of Combined DNA/RNA Molecule: Synthetic oligonucleotide"
  source: /note="DNA/RNA"
  modified_base (9)..(9): 5-methyl bicyclic nucleic acid
  modified_base (10)..(10): bicyclic nucleic acid (BNA)
gguaaguuct

SEQ ID NO: 19132 - DNA, 9 bp, Artificial Sequence
  source: /note="Description of Artificial Sequence: Synthetic oligonucleotide"
  source: /note="Description of Combined DNA/RNA Molecule: Synthetic oligonucleotide"
  source: /note="DNA/RNA"
  modified_base (8)..(8): bicyclic nucleic acid (BNA)
  modified_base (9)..(9): 5-methyl bicyclic nucleic acid
gguaagutc

SEQ ID NO: 19133 - DNA, 8 bp, Artificial Sequence
  source: /note="Description of Artificial Sequence: Synthetic oligonucleotide"
  source: /note="Description of Combined DNA/RNA Molecule: Synthetic oligonucleotide"
  source: /note="DNA/RNA"
  modified_base (7)..(7): bicyclic nucleic acid (BNA)
  modified_base (8)..(8): bicyclic nucleic acid (BNA)
gguaagtt

SEQ ID NO: 19134 - RNA, 20 nt, Artificial Sequence
  source: /note="Description of Artificial Sequence: Synthetic oligonucleotide"
  source: /note="RNA"
  modified_base (1)..(1): 5-methyl modified nucleotide
  modified_base (10)..(10): 5-methyl modified nucleotide
  modified_base (14)..(14): 5-methyl modified nucleotide
  modified_base (15)..(15): 5-methyl modified nucleotide
  modified_base (19)..(19): 5-methyl bicyclic nucleic acid
  modified_base (20)..(20): 5-methyl bicyclic nucleic acid
cgguaaguucuguccaagcc

SEQ ID NO: 19135 - RNA, 19 nt, Artificial Sequence
  source: /note="Description of Artificial Sequence: Synthetic oligonucleotide"
  source: /note="RNA"
  modified_base (1)..(1): 5-methyl modified nucleotide
  modified_base (10)..(10): 5-methyl modified nucleotide
  modified_base (14)..(14): 5-methyl modified nucleotide
  modified_base (15)..(15): 5-methyl modified nucleotide
  modified_base (18)..(18): bicyclic nucleic acid (BNA)
  modified_base (19)..(19): 5-methyl bicyclic nucleic acid
cgguaaguucuguccaagc

SEQ ID NO: 19136 - RNA, 18 nt, Artificial Sequence
  source: /note="Description of Artificial Sequence: Synthetic oligonucleotide"
  source: /note="RNA"
  modified_base (1)..(1): 5-methyl modified nucleotide
  modified_base (10)..(10): 5-methyl modified nucleotide
  modified_base (14)..(14): 5-methyl modified nucleotide
  modified_base (15)..(15): 5-methyl modified nucleotide
  modified_base (17)..(17): bicyclic nucleic acid (BNA)
  modified_base (18)..(18): bicyclic nucleic acid (BNA)
cgguaaguucuguccaag

SEQ ID NO: 19137 - RNA, 17 nt, Artificial Sequence
  source: /note="Description of Artificial Sequence: Synthetic oligonucleotide"
  source: /note="RNA"
  modified_base (1)..(1): 5-methyl modified nucleotide
  modified_base (10)..(10): 5-methyl modified nucleotide
  modified_base (14)..(14): 5-methyl modified nucleotide
  modified_base (15)..(15): 5-methyl modified nucleotide
  modified_base (16)..(16): bicyclic nucleic acid (BNA)
  modified_base (17)..(17): bicyclic nucleic acid (BNA)
cgguaaguucuguccaa

SEQ ID NO: 19138 - RNA, 16 nt, Artificial Sequence
  source: /note="Description of Artificial Sequence: Synthetic oligonucleotide"
  source: /note="RNA"
  modified_base (1)..(1): 5-methyl modified nucleotide
  modified_base (10)..(10): 5-methyl modified nucleotide
  modified_base (14)..(14): 5-methyl modified nucleotide
  modified_base (15)..(15): 5-methyl bicyclic nucleic acid
  modified_base (16)..(16): bicyclic nucleic acid (BNA)
cgguaaguucugucca

SEQ ID NO: 19139 - RNA, 15 nt, Artificial Sequence
  source: /note="Description of Artificial Sequence: Synthetic oligonucleotide"
  source: /note="RNA"
  modified_base (1)..(1): 5-methyl modified nucleotide
  modified_base (10)..(10): 5-methyl modified nucleotide
  modified_base (14)..(14): 5-methyl bicyclic nucleic acid
  modified_base (15)..(15): 5-methyl bicyclic nucleic acid
cgguaaguucugucc

SEQ ID NO: 19140 - DNA, 14 bp, Artificial Sequence
  source: /note="Description of Artificial Sequence: Synthetic oligonucleotide"
  source: /note="Description of Combined DNA/RNA Molecule: Synthetic oligonucleotide"
  source: /note="DNA/RNA"
  modified_base (1)..(1): 5-methyl modified nucleotide
  modified_base (10)..(10): 5-methyl modified nucleotide
  modified_base (13)..(13): bicyclic nucleic acid (BNA)
  modified_base (14)..(14): 5-methyl bicyclic nucleic acid
cgguaaguucugtc

SEQ ID NO: 19141 - DNA, 13 bp, Artificial Sequence
  source: /note="Description of Artificial Sequence: Synthetic oligonucleotide"
  source: /note="Description of Combined DNA/RNA Molecule: Synthetic oligonucleotide"
  source: /note="DNA/RNA"
  modified_base (1)..(1): 5-methyl modified nucleotide
  modified_base (10)..(10): 5-methyl modified nucleotide
  modified_base (12)..(12): bicyclic nucleic acid (BNA)
  modified_base (13)..(13): bicyclic nucleic acid (BNA)
cgguaaguucugt

SEQ ID NO: 19142 - DNA, 12 bp, Artificial Sequence
  source: /note="Description of Artificial Sequence: Synthetic oligonucleotide"
  source: /note="Description of Combined DNA/RNA Molecule: Synthetic oligonucleotide"
  source: /note="DNA/RNA"
  modified_base (1)..(1): 5-methyl modified nucleotide
  modified_base (10)..(10): 5-methyl modified nucleotide
  modified_base (11)..(11): bicyclic nucleic acid (BNA)
  modified_base (12)..(12): bicyclic nucleic acid (BNA)
cgguaaguuctg

SEQ ID NO: 19143 - DNA, 11 bp, Artificial Sequence
  source: /note="Description of Artificial Sequence: Synthetic oligonucleotide"
  source: /note="Description of Combined DNA/RNA Molecule: Synthetic oligonucleotide"
  source: /note="DNA/RNA"
  modified_base (1)..(1): 5-methyl modified nucleotide
  modified_base (10)..(10): 5-methyl bicyclic nucleic acid
  modified_base (11)..(11): bicyclic nucleic acid (BNA)
cgguaaguuct

SEQ ID NO: 19144 - DNA, 10 bp, Artificial Sequence
  source: /note="Description of Artificial Sequence: Synthetic oligonucleotide"
  source: /note="Description of Combined DNA/RNA Molecule: Synthetic oligonucleotide"
  source: /note="DNA/RNA"
  modified_base (1)..(1): 5-methyl modified nucleotide
  modified_base (9)..(9): bicyclic nucleic acid (BNA)
  modified_base (10)..(10): 5-methyl bicyclic nucleic acid
cgguaagutc

SEQ ID NO: 19145 - DNA, 9 bp, Artificial Sequence
  source: /note="Description of Artificial Sequence: Synthetic oligonucleotide"
  source: /note="Description of Combined DNA/RNA Molecule: Synthetic oligonucleotide"
  source: /note="DNA/RNA"
  modified_base (1)..(1): 5-methyl modified nucleotide
  modified_base (8)..(8): bicyclic nucleic acid (BNA)
  modified_base (9)..(9): bicyclic nucleic acid (BNA)
cgguaagtt

SEQ ID NO: 19146 - DNA, 8 bp, Artificial Sequence
  source: /note="Description of Artificial Sequence: Synthetic oligonucleotide"
  source: /note="Description of Combined DNA/RNA Molecule: Synthetic oligonucleotide"
  source: /note="DNA/RNA"
  modified_base (1)..(1): 5-methyl modified nucleotide
  modified_base (7)..(7): bicyclic nucleic acid (BNA)
  modified_base (8)..(8): bicyclic nucleic acid (BNA)
cgguaagt

SEQ ID NO: 19147 - RNA, 20 nt, Artificial Sequence
  source: /note="Description of Artificial Sequence: Synthetic oligonucleotide"
  source: /note="RNA"
  modified_base (2)..(2): 5-methyl modified nucleotide
  modified_base (11)..(11): 5-methyl modified nucleotide
  modified_base (15)..(15): 5-methyl modified nucleotide
  modified_base (16)..(16): 5-methyl modified nucleotide
  modified_base (19)..(19): bicyclic nucleic acid (BNA)
  modified_base (20)..(20): 5-methyl bicyclic nucleic acid
ucgguaaguucuguccaagc

SEQ ID NO: 19148 - RNA, 19 nt, Artificial Sequence
  source: /note="Description of Artificial Sequence: Synthetic oligonucleotide"
  source: /note="RNA"
  modified_base (2)..(2): 5-methyl modified nucleotide
  modified_base (11)..(11): 5-methyl modified nucleotide
  modified_base (15)..(15): 5-methyl modified nucleotide
  modified_base (16)..(16): 5-methyl modified nucleotide
  modified_base (18)..(18): bicyclic nucleic acid (BNA)
  modified_base (19)..(19): bicyclic nucleic acid (BNA)
ucgguaaguucuguccaag

SEQ ID NO: 19149 - RNA, 18 nt, Artificial Sequence
  source: /note="Description of Artificial Sequence: Synthetic oligonucleotide"
  source: /note="RNA"
  modified_base (2)..(2): 5-methyl modified nucleotide
  modified_base (11)..(11): 5-methyl modified nucleotide
  modified_base (15)..(15): 5-methyl modified nucleotide
  modified_base (16)..(16): 5-methyl modified nucleotide
  modified_base (17)..(17): bicyclic nucleic acid (BNA)
  modified_base (18)..(18): bicyclic nucleic acid (BNA)
ucgguaaguucuguccaa

SEQ ID NO: 19150 - RNA, 17 nt, Artificial Sequence
  source: /note="Description of Artificial Sequence: Synthetic oligonucleotide"
  source: /note="RNA"
  modified_base (2)..(2): 5-methyl modified nucleotide
  modified_base (11)..(11): 5-methyl modified nucleotide
  modified_base (15)..(15): 5-methyl modified nucleotide
  modified_base (16)..(16): 5-methyl bicyclic nucleic acid
  modified_base (17)..(17): bicyclic nucleic acid (BNA)
ucgguaaguucugucca

SEQ ID NO: 19151 - RNA, 16 nt, Artificial Sequence
  source: /note="Description of Artificial Sequence: Synthetic oligonucleotide"
  source: /note="RNA"
  modified_base (2)..(2): 5-methyl modified nucleotide
  modified_base (11)..(11): 5-methyl modified nucleotide
  modified_base (15)..(15): 5-methyl bicyclic nucleic acid
  modified_base (16)..(16): 5-methyl bicyclic nucleic acid
ucgguaaguucugucc

SEQ ID NO: 19152 - DNA, 15 bp, Artificial Sequence
  source: /note="Description of Artificial Sequence: Synthetic oligonucleotide"
  source: /note="Description of Combined DNA/RNA Molecule: Synthetic oligonucleotide"
  source: /note="DNA/RNA"
  modified_base (2)..(2): 5-methyl modified nucleotide
  modified_base (11)..(11): 5-methyl modified nucleotide
  modified_base (14)..(14): bicyclic nucleic acid (BNA)
  modified_base (15)..(15): 5-methyl bicyclic nucleic acid
ucgguaaguucugtc

SEQ ID NO: 19153 - DNA, 14 bp, Artificial Sequence
  source: /note="Description of Artificial Sequence: Synthetic oligonucleotide"
  source: /note="Description of Combined DNA/RNA Molecule: Synthetic oligonucleotide"
  source: /note="DNA/RNA"
  modified_base (2)..(2): 5-methyl modified nucleotide
  modified_base (11)..(11): 5-methyl modified nucleotide
  modified_base (13)..(13): bicyclic nucleic acid (BNA)
  modified_base (14)..(14): bicyclic nucleic acid (BNA)
ucgguaaguucugt

SEQ ID NO: 19154 - DNA, 13 bp, Artificial Sequence
  source: /note="Description of Artificial Sequence: Synthetic oligonucleotide"
  source: /note="Description of Combined DNA/RNA Molecule: Synthetic oligonucleotide"
  source: /note="DNA/RNA"
  modified_base (2)..(2): 5-methyl modified nucleotide
  modified_base (11)..(11): 5-methyl modified nucleotide
  modified_base (12)..(12): bicyclic nucleic acid (BNA)
  modified_base (13)..(13): bicyclic nucleic acid (BNA)
ucgguaaguuctg

SEQ ID NO: 19155 - DNA, 12 bp, Artificial Sequence
  source: /note="Description of Artificial Sequence: Synthetic oligonucleotide"
  source: /note="Description of Combined DNA/RNA Molecule: Synthetic oligonucleotide"
  source: /note="DNA/RNA"
  modified_base (2)..(2): 5-methyl modified nucleotide
  modified_base (11)..(11): 5-methyl bicyclic nucleic acid
  modified_base (12)..(12): bicyclic nucleic acid (BNA)
ucgguaaguuct

SEQ ID NO: 19156 - DNA, 11 bp, Artificial Sequence
  source: /note="Description of Artificial Sequence: Synthetic oligonucleotide"
  source: /note="Description of Combined DNA/RNA Molecule: Synthetic oligonucleotide"
  source: /note="DNA/RNA"
  modified_base (2)..(2): 5-methyl modified nucleotide
  modified_base (10)..(10): bicyclic nucleic acid (BNA)
  modified_base (11)..(11): 5-methyl bicyclic nucleic acid
ucgguaagutc

SEQ ID NO: 19157 - DNA, 10 bp, Artificial Sequence
  source: /note="Description of Artificial Sequence: Synthetic oligonucleotide"
  source: /note="Description of Combined DNA/RNA Molecule: Synthetic oligonucleotide"
  source: /note="DNA/RNA"
  modified_base (2)..(2): 5-methyl modified nucleotide
  modified_base (9)..(9): bicyclic nucleic acid (BNA)
  modified_base (10)..(10): bicyclic nucleic acid (BNA)
ucgguaagtt

SEQ ID NO: 19158 - DNA, 9 bp, Artificial Sequence
  source: /note="Description of Artificial Sequence: Synthetic oligonucleotide"
  source: /note="Description of Combined DNA/RNA Molecule: Synthetic oligonucleotide"
  source: /note="DNA/RNA"
  modified_base (2)..(2): 5-methyl modified nucleotide
  modified_base (8)..(8): bicyclic nucleic acid (BNA)
  modified_base (9)..(9): bicyclic nucleic acid (BNA)
ucgguaagt

SEQ ID NO: 19159 - RNA, 20 nt, Artificial Sequence
  source: /note="Description of Artificial Sequence: Synthetic oligonucleotide"
  source: /note="RNA"
  modified_base (3)..(3): 5-methyl modified nucleotide
  modified_base (12)..(12): 5-methyl modified nucleotide
  modified_base (16)..(16): 5-methyl modified nucleotide
  modified_base (17)..(17): 5-methyl modified nucleotide
  modified_base (19)..(19): bicyclic nucleic acid (BNA)
  modified_base (20)..(20): bicyclic nucleic acid (BNA)
gucgguaaguucuguccaag

SEQ ID NO: 19160 - RNA, 19 nt, Artificial Sequence
  source: /note="Description of Artificial Sequence: Synthetic oligonucleotide"
  source: /note="RNA"
  modified_base (3)..(3): 5-methyl modified nucleotide
  modified_base (12)..(12): 5-methyl modified nucleotide
  modified_base (16)..(16): 5-methyl modified nucleotide
  modified_base (17)..(17): 5-methyl modified nucleotide
  modified_base (18)..(18): bicyclic nucleic acid (BNA)
  modified_base (19)..(19): bicyclic nucleic acid (BNA)
gucgguaaguucuguccaa

SEQ ID NO: 19161 - RNA, 18 nt, Artificial Sequence
  source: /note="Description of Artificial Sequence: Synthetic oligonucleotide"
  source: /note="RNA"
  modified_base (3)..(3): 5-methyl modified nucleotide
  modified_base (12)..(12): 5-methyl modified nucleotide
  modified_base (16)..(16): 5-methyl modified nucleotide
  modified_base (17)..(17): 5-methyl bicyclic nucleic acid
  modified_base (18)..(18): bicyclic nucleic acid (BNA)
gucgguaaguucugucca

SEQ ID NO: 19162 - RNA, 17 nt, Artificial Sequence
  source: /note="Description of Artificial Sequence: Synthetic oligonucleotide"
  source: /note="RNA"
  modified_base (3)..(3): 5-methyl modified nucleotide
  modified_base (12)..(12): 5-methyl modified nucleotide
  modified_base (16)..(16): 5-methyl bicyclic nucleic acid
  modified_base (17)..(17): 5-methyl bicyclic nucleic acid
gucgguaaguucugucc

SEQ ID NO: 19163 - DNA, 16 bp, Artificial Sequence
  source: /note="Description of Artificial Sequence: Synthetic oligonucleotide"
  source: /note="Description of Combined DNA/RNA Molecule: Synthetic oligonucleotide"
  source: /note="DNA/RNA"
  modified_base (3)..(3): 5-methyl modified nucleotide
  modified_base (12)..(12): 5-methyl modified nucleotide
  modified_base (15)..(15): bicyclic nucleic acid (BNA)
  modified_base (16)..(16): 5-methyl bicyclic nucleic acid
gucgguaaguucugtc

SEQ ID NO: 19164 - DNA, 15 bp, Artificial Sequence
  source: /note="Description of Artificial Sequence: Synthetic oligonucleotide"
  source: /note="Description of Combined DNA/RNA Molecule: Synthetic oligonucleotide"
  source: /note="DNA/RNA"
  modified_base (3)..(3): 5-methyl modified nucleotide
  modified_base (12)..(12): 5-methyl modified nucleotide
  modified_base (14)..(14): bicyclic nucleic acid (BNA)
  modified_base (15)..(15): bicyclic nucleic acid (BNA)
gucgguaaguucugt

SEQ ID NO: 19165 - DNA, 14 bp, Artificial Sequence
  source: /note="Description of Artificial Sequence: Synthetic oligonucleotide"
  source: /note="Description of Combined DNA/RNA Molecule: Synthetic oligonucleotide"
  source: /note="DNA/RNA"
  modified_base (3)..(3): 5-methyl modified nucleotide
  modified_base (12)..(12): 5-methyl modified nucleotide
  modified_base (13)..(13): bicyclic nucleic acid (BNA)
  modified_base (14)..(14): bicyclic nucleic acid (BNA)
gucgguaaguuctg

SEQ ID NO: 19166 - DNA, 13 bp, Artificial Sequence
  source: /note="Description of Artificial Sequence: Synthetic oligonucleotide"
  source: /note="Description of Combined DNA/RNA Molecule: Synthetic oligonucleotide"
  source: /note="DNA/RNA"
  modified_base (3)..(3): 5-methyl modified nucleotide
  modified_base (12)..(12): 5-methyl bicyclic nucleic acid
  modified_base (13)..(13): bicyclic nucleic acid (BNA)
gucgguaaguuct

SEQ ID NO: 19167 - DNA, 12 bp, Artificial Sequence
  source: /note="Description of Artificial Sequence: Synthetic oligonucleotide"
  source: /note="Description of Combined DNA/RNA Molecule: Synthetic oligonucleotide"
  source: /note="DNA/RNA"
  modified_base (3)..(3): 5-methyl modified nucleotide
  modified_base (11)..(11): bicyclic nucleic acid (BNA)
  modified_base (12)..(12): 5-methyl bicyclic nucleic acid
gucgguaagutc

SEQ ID NO: 19168 - DNA, 11 bp, Artificial Sequence
  source: /note="Description of Artificial Sequence: Synthetic oligonucleotide"
  source: /note="Description of Combined DNA/RNA Molecule: Synthetic oligonucleotide"
  source: /note="DNA/RNA"
  modified_base (3)..(3): 5-methyl modified nucleotide
  modified_base (10)..(10): bicyclic nucleic acid (BNA)
  modified_base (11)..(11): bicyclic nucleic acid (BNA)
gucgguaagtt

SEQ ID NO: 19169 - DNA, 10 bp, Artificial Sequence
  source: /note="Description of Artificial Sequence: Synthetic oligonucleotide"
  source: /note="Description of Combined DNA/RNA Molecule: Synthetic oligonucleotide"
  source: /note="DNA/RNA"
  modified_base (3)..(3): 5-methyl modified nucleotide
  modified_base (9)..(9): bicyclic nucleic acid (BNA)
  modified_base (10)..(10): bicyclic nucleic acid (BNA)
gucgguaagt

SEQ ID NO: 19170 - RNA, 20 nt, Artificial Sequence
  source: /note="Description of Artificial Sequence: Synthetic oligonucleotide"
  source: /note="RNA"
  modified_base (4)..(4): 5-methyl modified nucleotide
  modified_base (13)..(13): 5-methyl modified nucleotide
  modified_base (17)..(17): 5-methyl modified nucleotide
  modified_base (18)..(18): 5-methyl modified nucleotide
  modified_base (19)..(19): bicyclic nucleic acid (BNA)
  modified_base (20)..(20): bicyclic nucleic acid (BNA)
agucgguaaguucuguccaa

SEQ ID NO: 19171 - RNA, 19 nt, Artificial Sequence
  source: /note="Description of Artificial Sequence: Synthetic oligonucleotide"
  source: /note="RNA"
  modified_base (4)..(4): 5-methyl modified nucleotide
  modified_base (13)..(13): 5-methyl modified nucleotide
  modified_base (17)..(17): 5-methyl modified nucleotide
  modified_base (18)..(18): 5-methyl bicyclic nucleic acid
  modified_base (19)..(19): bicyclic nucleic acid (BNA)
agucgguaaguucugucca

SEQ ID NO: 19172 - DNA, 17 bp, Artificial Sequence
  source: /note="Description of Artificial Sequence: Synthetic oligonucleotide"
  source: /note="Description of Combined DNA/RNA Molecule: Synthetic oligonucleotide"
  source: /note="DNA/RNA"
  modified_base (4)..(4): 5-methyl modified nucleotide
  modified_base (13)..(13): 5-methyl modified nucleotide
  modified_base (16)..(16): bicyclic nucleic acid (BNA)
  modified_base (17)..(17): 5-methyl bicyclic nucleic acid
agucgguaaguucugtc

SEQ ID NO: 19173 - DNA, 16 bp, Artificial Sequence
  source: /note="Description of Artificial Sequence: Synthetic oligonucleotide"
  source: /note="Description of Combined DNA/RNA Molecule: Synthetic oligonucleotide"
  source: /note="DNA/RNA"
  modified_base (4)..(4): 5-methyl modified nucleotide
  modified_base (13)..(13): 5-methyl modified nucleotide
  modified_base (15)..(15): bicyclic nucleic acid (BNA)
  modified_base (16)..(16): bicyclic nucleic acid (BNA)
agucgguaaguucugt

SEQ ID NO: 19174 - DNA, 15 bp, Artificial Sequence
  source: /note="Description of Artificial Sequence: Synthetic oligonucleotide"
  source: /note="Description of Combined DNA/RNA Molecule: Synthetic oligonucleotide"
  source: /note="DNA/RNA"
  modified_base (4)..(4): 5-methyl modified nucleotide
  modified_base (13)..(13): 5-methyl modified nucleotide
  modified_base (14)..(14): bicyclic nucleic acid (BNA)
  modified_base (15)..(15): bicyclic nucleic acid (BNA)
agucgguaaguuctg

SEQ ID NO: 19175 - DNA, 14 bp, Artificial Sequence
  source: /note="Description of Artificial Sequence: Synthetic oligonucleotide"
  source: /note="Description of Combined DNA/RNA Molecule: Synthetic oligonucleotide"
  source: /note="DNA/RNA"
  modified_base (4)..(4): 5-methyl modified nucleotide
  modified_base (13)..(13): 5-methyl bicyclic nucleic acid
  modified_base (14)..(14): bicyclic nucleic acid (BNA)
agucgguaaguuct

SEQ ID NO: 19176 - DNA, 13 bp, Artificial Sequence
  source: /note="Description of Artificial Sequence: Synthetic oligonucleotide"
  source: /note="Description of Combined DNA/RNA Molecule: Synthetic oligonucleotide"
  source: /note="DNA/RNA"
  modified_base (4)..(4): 5-methyl modified nucleotide
  modified_base (12)..(12): bicyclic nucleic acid (BNA)
  modified_base (13)..(13): 5-methyl bicyclic nucleic acid
agucgguaagutc

SEQ ID NO: 19177 - DNA, 12 bp, Artificial Sequence
  source: /note="Description of Artificial Sequence: Synthetic oligonucleotide"
  source: /note="Description of Combined DNA/RNA Molecule: Synthetic oligonucleotide"
  source: /note="DNA/RNA"
  modified_base (4)..(4): 5-methyl modified nucleotide
  modified_base (11)..(11): bicyclic nucleic acid (BNA)
  modified_base (12)..(12): bicyclic nucleic acid (BNA)
agucgguaagtt

SEQ ID NO: 19178 - DNA, 11 bp, Artificial Sequence
  source: /note="Description of Artificial Sequence: Synthetic oligonucleotide"
  source: /note="Description of Combined DNA/RNA Molecule: Synthetic oligonucleotide"
  source: /note="DNA/RNA"
  modified_base (4)..(4): 5-methyl modified nucleotide
  modified_base (10)..(10): bicyclic nucleic acid (BNA)
  modified_base (11)..(11): bicyclic nucleic acid (BNA)
agucgguaagt

SEQ ID NO: 19179 - RNA, 20 nt, Artificial Sequence
  source: /note="Description of Artificial Sequence: Synthetic oligonucleotide"
  source: /note="RNA"
  modified_base (1)..(1): 5-methyl modified nucleotide
  modified_base (5)..(5): 5-methyl modified nucleotide
  modified_base (14)..(14): 5-methyl modified nucleotide
  modified_base (18)..(18): 5-methyl modified nucleotide
  modified_base (19)..(19): 5-methyl bicyclic nucleic acid
  modified_base (20)..(20): bicyclic nucleic acid (BNA)
cagucgguaaguucugucca

SEQ ID NO: 19180 - RNA, 19 nt, Artificial Sequence
  source: /note="Description of Artificial Sequence: Synthetic oligonucleotide"
  source: /note="RNA"
  modified_base (1)..(1): 5-methyl modified nucleotide
  modified_base (5)..(5): 5-methyl modified nucleotide
  modified_base (14)..(14): 5-methyl modified nucleotide
  modified_base (18)..(18): 5-methyl bicyclic nucleic acid
  modified_base (19)..(19): 5-methyl bicyclic nucleic acid
cagucgguaaguucugucc

SEQ ID NO: 19181 - DNA, 18 bp, Artificial Sequence
  source: /note="Description of Artificial Sequence: Synthetic oligonucleotide"
  source: /note="Description of Combined DNA/RNA Molecule: Synthetic oligonucleotide"
  source: /note="DNA/RNA"
  modified_base (1)..(1): 5-methyl modified nucleotide
  modified_base (5)..(5): 5-methyl modified nucleotide
  modified_base (14)..(14): 5-methyl modified nucleotide
  modified_base (17)..(17): bicyclic nucleic acid (BNA)
  modified_base (18)..(18): 5-methyl bicyclic nucleic acid
cagucgguaaguucugtc

SEQ ID NO: 19182 - DNA, 17 bp, Artificial Sequence
  source: /note="Description of Artificial Sequence: Synthetic oligonucleotide"
  source: /note="Description of Combined DNA/RNA Molecule: Synthetic oligonucleotide"
  source: /note="DNA/RNA"
  modified_base (1)..(1): 5-methyl modified nucleotide
  modified_base (5)..(5): 5-methyl modified nucleotide
  modified_base (14)..(14): 5-methyl modified nucleotide
  modified_base (16)..(16): bicyclic nucleic acid (BNA)
  modified_base (17)..(17): bicyclic nucleic acid (BNA)
cagucgguaaguucugt

SEQ ID NO: 19183 - DNA, 16 bp, Artificial Sequence
  source: /note="Description of Artificial Sequence: Synthetic oligonucleotide"
  source: /note="Description of Combined DNA/RNA Molecule: Synthetic oligonucleotide"
  source: /note="DNA/RNA"
  modified_base (1)..(1): 5-methyl modified nucleotide
  modified_base (5)..(5): 5-methyl modified nucleotide
  modified_base (14)..(14): 5-methyl modified nucleotide
  modified_base (15)..(15): bicyclic nucleic acid (BNA)
  modified_base (16)..(16): bicyclic nucleic acid (BNA)
cagucgguaaguuctg

SEQ ID NO: 19184 - DNA, 15 bp, Artificial Sequence
  source: /note="Description of Artificial Sequence: Synthetic oligonucleotide"
  source: /note="Description of Combined DNA/RNA Molecule: Synthetic oligonucleotide"
  source: /note="DNA/RNA"
  modified_base (1)..(1): 5-methyl modified nucleotide
  modified_base (5)..(5): 5-methyl modified nucleotide
  modified_base (14)..(14): 5-methyl bicyclic nucleic acid
  modified_base (15)..(15): bicyclic nucleic acid (BNA)
cagucgguaaguuct

SEQ ID NO: 19185 - DNA, 14 bp, Artificial Sequence
  source: /note="Description of Artificial Sequence: Synthetic oligonucleotide"
  source: /note="Description of Combined DNA/RNA Molecule: Synthetic oligonucleotide"
  source: /note="DNA/RNA"
  modified_base (1)..(1): 5-methyl modified nucleotide
  modified_base (5)..(5): 5-methyl modified nucleotide
  modified_base (13)..(13): bicyclic nucleic acid (BNA)
  modified_base (14)..(14): 5-methyl bicyclic nucleic acid
cagucgguaagutc

SEQ ID NO: 19186 - DNA, 13 bp, Artificial Sequence
  source: /note="Description of Artificial Sequence: Synthetic oligonucleotide"
  source: /note="Description of Combined DNA/RNA Molecule: Synthetic oligonucleotide"
  source: /note="DNA/RNA"
  modified_base (1)..(1): 5-methyl modified nucleotide
  modified_base (5)..(5): 5-methyl modified nucleotide
  modified_base (12)..(12): bicyclic nucleic acid (BNA)
  modified_base (13)..(13): bicyclic nucleic acid (BNA)
cagucgguaagtt

SEQ ID NO: 19187 - DNA, 12 bp, Artificial Sequence
  source: /note="Description of Artificial Sequence: Synthetic oligonucleotide"
  source: /note="Description of Combined DNA/RNA Molecule: Synthetic oligonucleotide"
  source: /note="DNA/RNA"
  modified_base (1)..(1): 5-methyl modified nucleotide
  modified_base (5)..(5): 5-methyl modified nucleotide
  modified_base (11)..(11): bicyclic nucleic acid (BNA)
  modified_base (12)..(12): bicyclic nucleic acid (BNA)
cagucgguaagt

SEQ ID NO: 19188 - RNA, 20 nt, Artificial Sequence
  source: /note="Description of Artificial Sequence: Synthetic oligonucleotide"
  source: /note="RNA"
  modified_base (1)..(1): 5-methyl modified nucleotide
  modified_base (2)..(2): 5-methyl modified nucleotide
  modified_base (6)..(6): 5-methyl modified nucleotide
  modified_base (15)..(15): 5-methyl modified nucleotide
  modified_base (19)..(19): 5-methyl bicyclic nucleic acid
  modified_base (20)..(20): 5-methyl bicyclic nucleic acid
ccagucgguaaguucugucc

SEQ ID NO: 19189 - DNA, 19 bp, Artificial Sequence
  source: /note="Description of Artificial Sequence: Synthetic oligonucleotide"
  source: /note="Description of Combined DNA/RNA Molecule: Synthetic oligonucleotide"
  source: /note="DNA/RNA"
  modified_base (1)..(1): 5-methyl modified nucleotide
  modified_base (2)..(2): 5-methyl modified nucleotide
  modified_base (6)..(6): 5-methyl modified nucleotide
  modified_base (15)..(15): 5-methyl modified nucleotide
  modified_base (18)..(18): bicyclic nucleic acid (BNA)
  modified_base (19)..(19): 5-methyl bicyclic nucleic acid
ccagucgguaaguucugtc

SEQ ID NO: 19190 - DNA, 18 bp, Artificial Sequence
  source: /note="Description of Artificial Sequence: Synthetic oligonucleotide"
  source: /note="Description of Combined DNA/RNA Molecule: Synthetic oligonucleotide"
  source: /note="DNA/RNA"
  modified_base (1)..(1): 5-methyl modified nucleotide
  modified_base (2)..(2): 5-methyl modified nucleotide
  modified_base (6)..(6): 5-methyl modified nucleotide
  modified_base (15)..(15): 5-methyl modified nucleotide
  modified_base (17)..(17): bicyclic nucleic acid (BNA)
  modified_base (18)..(18): bicyclic nucleic acid (BNA)
ccagucgguaaguucugt

SEQ ID NO: 19191 - DNA, 17 bp, Artificial Sequence
  source: /note="Description of Artificial Sequence: Synthetic oligonucleotide"
  source: /note="Description of Combined DNA/RNA Molecule: Synthetic oligonucleotide"
  source: /note="DNA/RNA"
  modified_base (1)..(1): 5-methyl modified nucleotide
  modified_base (2)..(2): 5-methyl modified nucleotide
  modified_base (6)..(6): 5-methyl modified nucleotide
  modified_base (15)..(15): 5-methyl modified nucleotide
  modified_base (16)..(16): bicyclic nucleic acid (BNA)
  modified_base (17)..(17): bicyclic nucleic acid (BNA)
ccagucgguaaguuctg

SEQ ID NO: 19192 - DNA, 16 bp, Artificial Sequence
  source: /note="Description of Artificial Sequence: Synthetic oligonucleotide"
  source: /note="Description of Combined DNA/RNA Molecule: Synthetic oligonucleotide"
  source: /note="DNA/RNA"
  modified_base (1)..(1): 5-methyl modified nucleotide
  modified_base (2)..(2): 5-methyl modified nucleotide
  modified_base (6)..(6): 5-methyl modified nucleotide
  modified_base (15)..(15): 5-methyl bicyclic nucleic acid
  modified_base (16)..(16): bicyclic nucleic acid (BNA)
ccagucgguaaguuct

SEQ ID NO: 19193 - DNA, 15 bp, Artificial Sequence
  source: /note="Description of Artificial Sequence: Synthetic oligonucleotide"
  source: /note="Description of Combined DNA/RNA Molecule: Synthetic oligonucleotide"
  source: /note="DNA/RNA"
  modified_base (1)..(1): 5-methyl modified nucleotide
  modified_base (2)..(2): 5-methyl modified nucleotide
  modified_base (6)..(6): 5-methyl modified nucleotide
  modified_base (14)..(14): bicyclic nucleic acid (BNA)
  modified_base (15)..(15): 5-methyl bicyclic nucleic acid
ccagucgguaagutc

SEQ ID NO: 19194 - DNA, 14 bp, Artificial Sequence
  source: /note="Description of Artificial Sequence: Synthetic oligonucleotide"
  source: /note="Description of Combined DNA/RNA Molecule: Synthetic oligonucleotide"
  source: /note="DNA/RNA"
  modified_base (1)..(1): 5-methyl modified nucleotide
  modified_base (2)..(2): 5-methyl modified nucleotide
  modified_base (6)..(6): 5-methyl modified nucleotide
  modified_base (13)..(13): bicyclic nucleic acid (BNA)
  modified_base (14)..(14): bicyclic nucleic acid (BNA)
ccagucgguaagtt

SEQ ID NO: 19195 - DNA, 13 bp, Artificial Sequence
  source: /note="Description of Artificial Sequence: Synthetic oligonucleotide"
  source: /note="Description of Combined DNA/RNA Molecule: Synthetic oligonucleotide"
  source: /note="DNA/RNA"
  modified_base (1)..(1): 5-methyl modified nucleotide
  modified_base (2)..(2): 5-methyl modified nucleotide
  modified_base (6)..(6): 5-methyl modified nucleotide
  modified_base (12)..(12): bicyclic nucleic acid (BNA)
  modified_base (13)..(13): bicyclic nucleic acid (BNA)
ccagucgguaagt

SEQ ID NO: 19196 - DNA, 20 bp, Artificial Sequence
  source: /note="Description of Artificial Sequence: Synthetic oligonucleotide"
  source: /note="Description of Combined DNA/RNA Molecule: Synthetic oligonucleotide"
  source: /note="DNA/RNA"
  modified_base (2)..(2): 5-methyl modified nucleotide
  modified_base (3)..(3): 5-methyl modified nucleotide
  modified_base (7)..(7): 5-methyl modified nucleotide
  modified_base (16)..(16): 5-methyl modified nucleotide
  modified_base (19)..(19): bicyclic nucleic acid (BNA)
  modified_base (20)..(20): 5-methyl bicyclic nucleic acid
gccagucgguaaguucugtc

SEQ ID NO: 19197 - DNA, 19 bp, Artificial Sequence
  source: /note="Description of Artificial Sequence: Synthetic oligonucleotide"
  source: /note="Description of Combined DNA/RNA Molecule: Synthetic oligonucleotide"
  source: /note="DNA/RNA"
  modified_base (2)..(2): 5-methyl modified nucleotide
  modified_base (3)..(3): 5-methyl modified nucleotide
  modified_base (7)..(7): 5-methyl modified nucleotide
  modified_base (16)..(16): 5-methyl modified nucleotide
  modified_base (18)..(18): bicyclic nucleic acid (BNA)
  modified_base (19)..(19): bicyclic nucleic acid (BNA)
gccagucgguaaguucugt

SEQ ID NO: 19198 - DNA, 18 bp, Artificial Sequence
  source: /note="Description of Artificial Sequence: Synthetic oligonucleotide"
  source: /note="Description of Combined DNA/RNA Molecule: Synthetic oligonucleotide"
  source: /note="DNA/RNA"
  modified_base (2)..(2): 5-methyl modified nucleotide
  modified_base (3)..(3): 5-methyl modified nucleotide
  modified_base (7)..(7): 5-methyl modified nucleotide
  modified_base (16)..(16): 5-methyl modified nucleotide
  modified_base (17)..(17): bicyclic nucleic acid (BNA)
  modified_base (18)..(18): bicyclic nucleic acid (BNA)
gccagucgguaaguuctg

SEQ ID NO: 19199 - DNA, 17 bp, Artificial Sequence
  source: /note="Description of Artificial Sequence: Synthetic oligonucleotide"
  source: /note="Description of Combined DNA/RNA Molecule: Synthetic oligonucleotide"
  source: /note="DNA/RNA"
  modified_base (2)..(2): 5-methyl modified nucleotide
  modified_base (3)..(3): 5-methyl modified nucleotide
  modified_base (7)..(7): 5-methyl modified nucleotide
  modified_base (16)..(16): 5-methyl bicyclic nucleic acid
  modified_base (17)..(17): bicyclic nucleic acid (BNA)
gccagucgguaaguuct

SEQ ID NO: 19200 - DNA, 16 bp, Artificial Sequence
  source: /note="Description of Artificial Sequence: Synthetic oligonucleotide"
  source: /note="Description of Combined DNA/RNA Molecule: Synthetic oligonucleotide"
  source: /note="DNA/RNA"
  modified_base (2)..(2): 5-methyl modified nucleotide
  modified_base (3)..(3): 5-methyl modified nucleotide
  modified_base (7)..(7): 5-methyl modified nucleotide
  modified_base (15)..(15): bicyclic nucleic acid (BNA)
  modified_base (16)..(16): 5-methyl bicyclic nucleic acid
gccagucgguaagutc

SEQ ID NO: 19201 - DNA, 15 bp, Artificial Sequence
  source: /note="Description of Artificial Sequence: Synthetic oligonucleotide"
  source: /note="Description of Combined DNA/RNA Molecule: Synthetic oligonucleotide"
  source: /note="DNA/RNA"
  modified_base (2)..(2): 5-methyl modified nucleotide
  modified_base (3)..(3): 5-methyl modified nucleotide
  modified_base (7)..(7): 5-methyl modified nucleotide
  modified_base (14)..(14): bicyclic nucleic acid (BNA)
  modified_base (15)..(15): bicyclic nucleic acid (BNA)
gccagucgguaagtt

SEQ ID NO: 19202 - DNA, 14 bp, Artificial Sequence
  source: /note="Description of Artificial Sequence: Synthetic oligonucleotide"
  source: /note="Description of Combined DNA/RNA Molecule: Synthetic oligonucleotide"
  source: /note="DNA/RNA"
  modified_base (2)..(2): 5-methyl modified nucleotide
  modified_base (3)..(3): 5-methyl modified nucleotide
  modified_base (7)..(7): 5-methyl modified nucleotide
  modified_base (13)..(13): bicyclic nucleic acid (BNA)
  modified_base (14)..(14): bicyclic nucleic acid (BNA)
gccagucgguaagt

SEQ ID NO: 19203 - DNA, 20 bp, Artificial Sequence
  source: /note="Description of Artificial Sequence: Synthetic oligonucleotide"
  source: /note="Description of Combined DNA/RNA Molecule: Synthetic oligonucleotide"
  source: /note="DNA/RNA"
  modified_base (2)..(2): 5-methyl modified nucleotide
  modified_base (14)..(14): 5-methyl modified nucleotide
  modified_base (19)..(19): 5-methyl bicyclic nucleic acid
  modified_base (20)..(20): bicyclic nucleic acid (BNA)
ucaaggaagauggcauuuct

SEQ ID NO: 19204 - RNA, 22 nt, Artificial Sequence
  source: /note="Description of Artificial Sequence: Synthetic oligonucleotide"
  source: /note="RNA"
  modified_base (2)..(2): 5-methyl modified nucleotide
  modified_base (14)..(14): 5-methyl modified nucleotide
  modified_base (19)..(19): 5-methyl modified nucleotide
  modified_base (21)..(21): bicyclic nucleic acid (BNA)
  modified_base (22)..(22): bicyclic nucleic acid (BNA)
ucaaggaagauggcauuucuag

SEQ ID NO: 19205 - DNA, 16 bp, Artificial Sequence
  source: /note="Description of Artificial Sequence: Synthetic oligonucleotide"
  source: /note="Description of Combined DNA/RNA Molecule: Synthetic oligonucleotide"
  source: /note="DNA/RNA"
  modified_base (2)..(2): 5-methyl modified nucleotide
  modified_base (14)..(14): 5-methyl modified nucleotide
  modified_base (15)..(15): bicyclic nucleic acid (BNA)
  modified_base (16)..(16): bicyclic nucleic acid (BNA)
ucaaggaagauggcat

SEQ ID NO: 19206 - DNA, 15 bp, Artificial Sequence
  source: /note="Description of Artificial Sequence: Synthetic oligonucleotide"
  source: /note="Description of Combined DNA/RNA Molecule: Synthetic oligonucleotide"
  source: /note="DNA/RNA"
  modified_base (9)..(9): 5-methyl modified nucleotide
  modified_base (14)..(14): 5-methyl bicyclic nucleic acid
  modified_base (15)..(15): bicyclic nucleic acid (BNA)
gaagauggcauuuct

SEQ ID NO: 19207 - DNA, 21 bp, Artificial Sequence
  source: /note="Description of Artificial Sequence: Synthetic oligonucleotide"
  source: /note="Description of Combined DNA/RNA Molecule: Synthetic oligonucleotide"
  source: /note="DNA/RNA"
  modified_base (2)..(2): 5-methyl modified nucleotide
  modified_base (14)..(14): 5-methyl modified nucleotide
  modified_base (19)..(19): 5-methyl modified nucleotide
  modified_base (20)..(20): bicyclic nucleic acid (BNA)
  modified_base (21)..(21): bicyclic nucleic acid (BNA)
ucaaggaagauggcauuucta

SEQ ID NO: 19208 - DNA, 19 bp, Artificial Sequence
  source: /note="Description of Artificial Sequence: Synthetic oligonucleotide"
  source: /note="Description of Combined DNA/RNA Molecule: Synthetic oligonucleotide"
  source: /note="DNA/RNA"
  modified_base (2)..(2): 5-methyl modified nucleotide
  modified_base (14)..(14): 5-methyl modified nucleotide
  modified_base (18)..(18): bicyclic nucleic acid (BNA)
  modified_base (19)..(19): 5-methyl bicyclic nucleic acid
ucaaggaagauggcauutc

SEQ ID NO: 19209 - DNA, 18 bp, Artificial Sequence
  source: /note="Description of Artificial Sequence: Synthetic oligonucleotide"
  source: /note="Description of Combined DNA/RNA Molecule: Synthetic oligonucleotide"
  source: /note="DNA/RNA"
  modified_base (2)..(2): 5-methyl modified nucleotide
  modified_base (14)..(14): 5-methyl modified nucleotide
  modified_base (17)..(17): bicyclic nucleic acid (BNA)
  modified_base (18)..(18): bicyclic nucleic acid (BNA)
ucaaggaagauggcautt

SEQ ID NO: 19210 - DNA, 17 bp, Artificial Sequence
  source: /note="Description of Artificial Sequence: Synthetic oligonucleotide"
  source: /note="Description of Combined DNA/RNA Molecule: Synthetic oligonucleotide"
  source: /note="DNA/RNA"
  modified_base (2)..(2): 5-methyl modified nucleotide
  modified_base (14)..(14): 5-methyl modified nucleotide
  modified_base (16)..(16): bicyclic nucleic acid (BNA)
  modified_base (17)..(17): bicyclic nucleic acid (BNA)
ucaaggaagauggcatt

SEQ ID NO: 19211 - RNA, 15 nt, Artificial Sequence
  source: /note="Description of Artificial Sequence: Synthetic oligonucleotide"
  source: /note="RNA"
  modified_base (2)..(2): 5-methyl modified nucleotide
  modified_base (14)..(14): 5-methyl bicyclic nucleic acid
  modified_base (15)..(15): bicyclic nucleic acid (BNA)
ucaaggaagauggca

SEQ ID NO: 19212 - RNA, 14 nt, Artificial Sequence
  source: /note="Description of Artificial Sequence: Synthetic oligonucleotide"
  source: /note="RNA"
  modified_base (2)..(2): 5-methyl modified nucleotide
  modified_base (13)..(13): bicyclic nucleic acid (BNA)
  modified_base (14)..(14): 5-methyl bicyclic nucleic acid
ucaaggaagauggc

SEQ ID NO: 19213 - RNA, 13 nt, Artificial Sequence
  source: /note="Description of Artificial Sequence: Synthetic oligonucleotide"
  source: /note="RNA"
  modified_base (2)..(2): 5-methyl modified nucleotide
  modified_base (12)..(12): bicyclic nucleic acid (BNA)
  modified_base (13)..(13): bicyclic nucleic acid (BNA)
ucaaggaagaugg

SEQ ID NO: 19214 - DNA, 12 bp, Artificial Sequence
  source: /note="Description of Artificial Sequence: Synthetic oligonucleotide"
  source: /note="Description of Combined DNA/RNA Molecule: Synthetic oligonucleotide"
  source: /note="DNA/RNA"
  modified_base (2)..(2): 5-methyl modified nucleotide
  modified_base (11)..(11): bicyclic nucleic acid (BNA)
  modified_base (12)..(12): bicyclic nucleic acid (BNA)
ucaaggaagatg

SEQ ID NO: 19215 - DNA, 11 bp, Artificial Sequence
  source: /note="Description of Artificial Sequence: Synthetic oligonucleotide"
  source: /note="Description of Combined DNA/RNA Molecule: Synthetic oligonucleotide"
  source: /note="DNA/RNA"
  modified_base (2)..(2): 5-methyl modified nucleotide
  modified_base (10)..(10): bicyclic nucleic acid (BNA)
  modified_base (11)..(11): bicyclic nucleic acid (BNA)
ucaaggaagat

SEQ ID NO: 19216 - RNA, 10 nt, Artificial Sequence
  source: /note="Description of Artificial Sequence: Synthetic oligonucleotide"
  source: /note="RNA"
  modified_base (2)..(2): 5-methyl modified nucleotide
  modified_base (9)..(9): bicyclic nucleic acid (BNA)
  modified_base (10)..(10): bicyclic nucleic acid (BNA)
ucaaggaaga

SEQ ID NO: 19217 - RNA, 9 nt, Artificial Sequence
  source: /note="Description of Artificial Sequence: Synthetic oligonucleotide"
  source: /note="RNA"
  modified_base (2)..(2): 5-methyl modified nucleotide
  modified_base (8)..(8): bicyclic nucleic acid (BNA)
  modified_base (9)..(9): bicyclic nucleic acid (BNA)
ucaaggaag

SEQ ID NO: 19218 - RNA, 21 nt, Artificial Sequence
  source: /note="Description of Artificial Sequence: Synthetic oligonucleotide"
  source: /note="RNA"
  modified_base (1)..(1): 5-methyl modified nucleotide
  modified_base (13)..(13): 5-methyl modified nucleotide
  modified_base (18)..(18): 5-methyl modified nucleotide
  modified_base (20)..(20): bicyclic nucleic acid (BNA)
  modified_base (21)..(21): bicyclic nucleic acid (BNA)
caaggaagauggcauuucuag

SEQ ID NO: 19219 - DNA, 20 bp, Artificial Sequence
  source: /note="Description of Artificial Sequence: Synthetic oligonucleotide"
  source: /note="Description of Combined DNA/RNA Molecule: Synthetic oligonucleotide"
  source: /note="DNA/RNA"
  modified_base (1)..(1): 5-methyl modified nucleotide
  modified_base (13)..(13): 5-methyl modified nucleotide
  modified_base (18)..(18): 5-methyl modified nucleotide
  modified_base (19)..(19): bicyclic nucleic acid (BNA)
  modified_base (20)..(20): bicyclic nucleic acid (BNA)
caaggaagauggcauuucta

SEQ ID NO: 19220 - DNA, 19 bp, Artificial Sequence
  source: /note="Description of Artificial Sequence: Synthetic oligonucleotide"
  source: /note="Description of Combined DNA/RNA Molecule: Synthetic oligonucleotide"
  source: /note="DNA/RNA"
  modified_base (1)..(1): 5-methyl modified nucleotide
  modified_base (13)..(13): 5-methyl modified nucleotide
  modified_base (18)..(18): 5-methyl bicyclic nucleic acid
  modified_base (19)..(19): bicyclic nucleic acid (BNA)
caaggaagauggcauuuct

SEQ ID NO: 19221 - DNA, 18 bp, Artificial Sequence
  source: /note="Description of Artificial Sequence: Synthetic oligonucleotide"
  source: /note="Description of Combined DNA/RNA Molecule: Synthetic oligonucleotide"
  source: /note="DNA/RNA"
  modified_base (1)..(1): 5-methyl modified nucleotide
  modified_base (13)..(13): 5-methyl modified nucleotide
  modified_base (17)..(17): bicyclic nucleic acid (BNA)
  modified_base (18)..(18): 5-methyl bicyclic nucleic acid
caaggaagauggcauutc

SEQ ID NO: 19222 - DNA, 17 bp, Artificial Sequence
  source: /note="Description of Artificial Sequence: Synthetic oligonucleotide"
  source: /note="Description of Combined DNA/RNA Molecule: Synthetic oligonucleotide"
  source: /note="DNA/RNA"
  modified_base (1)..(1): 5-methyl modified nucleotide
  modified_base (13)..(13): 5-methyl modified nucleotide
  modified_base (16)..(16): bicyclic nucleic acid (BNA)
  modified_base (17)..(17): bicyclic nucleic acid (BNA)
caaggaagauggcautt

SEQ ID NO: 19223 - DNA, 16 bp, Artificial Sequence
  source: /note="Description of Artificial Sequence: Synthetic oligonucleotide"
  source: /note="Description of Combined DNA/RNA Molecule: Synthetic oligonucleotide"
  source: /note="DNA/RNA"
  modified_base (1)..(1): 5-methyl modified nucleotide
  modified_base (13)..(13): 5-methyl modified nucleotide
  modified_base (15)..(15): bicyclic nucleic acid (BNA)
  modified_base (16)..(16): bicyclic nucleic acid (BNA)
caaggaagauggcatt

SEQ ID NO: 19224 - DNA, 15 bp, Artificial Sequence
  source: /note="Description of Artificial Sequence: Synthetic oligonucleotide"
  source: /note="Description of Combined DNA/RNA Molecule: Synthetic oligonucleotide"
  source: /note="DNA/RNA"
  modified_base (1)..(1): 5-methyl modified nucleotide
  modified_base (13)..(13): 5-methyl modified nucleotide
  modified_base (14)..(14): bicyclic nucleic acid (BNA)
  modified_base (15)..(15): bicyclic nucleic acid (BNA)
caaggaagauggcat

SEQ ID NO: 19225 - RNA, 14 nt, Artificial Sequence
  source: /note="Description of Artificial Sequence: Synthetic oligonucleotide"
  source: /note="RNA"
  modified_base (1)..(1): 5-methyl modified nucleotide
  modified_base (13)..(13): 5-methyl bicyclic nucleic acid
  modified_base (14)..(14): bicyclic nucleic acid (BNA)
caaggaagauggca

SEQ ID NO: 19226 - RNA, 13 nt, Artificial Sequence
  source: /note="Description of Artificial Sequence: Synthetic oligonucleotide"
  source: /note="RNA"
  modified_base (1)..(1): 5-methyl modified nucleotide
  modified_base (12)..(12): bicyclic nucleic acid (BNA)
  modified_base (13)..(13): 5-methyl bicyclic nucleic acid
caaggaagauggc

SEQ ID NO: 19227 - RNA, 12 nt, Artificial Sequence
  source: /note="Description of Artificial Sequence: Synthetic oligonucleotide"
  source: /note="RNA"
  modified_base (1)..(1): 5-methyl modified nucleotide
  modified_base (11)..(11): bicyclic nucleic acid (BNA)
  modified_base (12)..(12): bicyclic nucleic acid (BNA)
caaggaagaugg

SEQ ID NO: 19228 - DNA, 11 bp, Artificial Sequence
  source: /note="Description of Artificial Sequence: Synthetic oligonucleotide"
  source: /note="DNA/RNA"
  modified_base (1)..(1): 5-methyl modified nucleotide
  modified_base (10)..(10): bicyclic nucleic acid (BNA)
  modified_base (11)..(11): bicyclic nucleic acid (BNA)
caaggaagatg

SEQ ID NO: 19229 - DNA, 10 bp, Artificial Sequence
  source: /note="Description of Artificial Sequence: Synthetic oligonucleotide"
  source: /note="DNA/RNA"
  modified_base (1)..(1): 5-methyl modified nucleotide
  modified_base (9)..(9): bicyclic nucleic acid (BNA)
  modified_base (10)..(10): bicyclic nucleic acid (BNA)
caaggaagat

SEQ ID NO: 19230 - RNA, 9 nt, Artificial Sequence
  source: /note="Description of Artificial Sequence: Synthetic oligonucleotide"
  source: /note="RNA/Antisense Oligonucleotide"
  modified_base (1)..(1): 5-methyl modified nucleotide
  modified_base (8)..(8): bicyclic nucleic acid (BNA)
  modified_base (9)..(9): bicyclic nucleic acid (BNA)
caaggaaga

SEQ ID NO: 19231 - RNA, 8 nt, Artificial Sequence
  source: /note="Description of Artificial Sequence: Synthetic oligonucleotide"
  source: /note="RNA/Antisense Oligonucleotide"
  modified_base (1)..(1): 5-methyl modified nucleotide
  modified_base (7)..(7): bicyclic nucleic acid (BNA)
  modified_base (8)..(8): bicyclic nucleic acid (BNA)
caaggaag

SEQ ID NO: 19232 - RNA, 20 nt, Artificial Sequence
  source: /note="Description of Artificial Sequence: Synthetic oligonucleotide"
  source: /note="RNA"
  modified_base (12)..(12): 5-methyl modified nucleotide
  modified_base (17)..(17): 5-methyl modified nucleotide
  modified_base (19)..(19): bicyclic nucleic acid (BNA)
  modified_base (20)..(20): bicyclic nucleic acid (BNA)
aaggaagauggcauuucuag

SEQ ID NO: 19233 - DNA, 19 bp, Artificial Sequence
  source: /note="Description of Artificial Sequence: Synthetic oligonucleotide"
  source: /note="Description of Combined DNA/RNA Molecule: Synthetic oligonucleotide"
  source: /note="DNA/RNA"
  modified_base (12)..(12): 5-methyl modified nucleotide
  modified_base (17)..(17): 5-methyl modified nucleotide
  modified_base (18)..(18): bicyclic nucleic acid (BNA)
  modified_base (19)..(19): bicyclic nucleic acid (BNA)
aaggaagauggcauuucta

SEQ ID NO: 19234 - DNA, 18 bp, Artificial Sequence
  source: /note="Description of Artificial Sequence: Synthetic oligonucleotide"
  source: /note="Description of Combined DNA/RNA Molecule: Synthetic oligonucleotide"
  source: /note="DNA/RNA"
  modified_base (12)..(12): 5-methyl modified nucleotide
  modified_base (17)..(17): 5-methyl bicyclic nucleic acid
  modified_base (18)..(18): bicyclic nucleic acid (BNA)
aaggaagauggcauuuct

SEQ ID NO: 19235 - DNA, 17 bp, Artificial Sequence
  source: /note="Description of Artificial Sequence: Synthetic oligonucleotide"
  source: /note="Description of Combined DNA/RNA Molecule: Synthetic oligonucleotide"
  source: /note="DNA/RNA"
  modified_base (12)..(12): 5-methyl modified nucleotide
  modified_base (16)..(16): bicyclic nucleic acid (BNA)
  modified_base (17)..(17): 5-methyl bicyclic nucleic acid
aaggaagauggcauutc

SEQ ID NO: 19236 - DNA, 16 bp, Artificial Sequence
  source: /note="Description of Artificial Sequence: Synthetic oligonucleotide"
  source: /note="Description of Combined DNA/RNA Molecule: Synthetic oligonucleotide"
  source: /note="DNA/RNA"
  modified_base (12)..(12): 5-methyl modified nucleotide
  modified_base (15)..(15): bicyclic nucleic acid (BNA)
  modified_base (16)..(16): bicyclic nucleic acid (BNA)
aaggaagauggcautt

SEQ ID NO: 19237 - DNA, 15 bp, Artificial Sequence
  source: /note="Description of Artificial Sequence: Synthetic oligonucleotide"
  source: /note="Description of Combined DNA/RNA Molecule: Synthetic oligonucleotide"
  source: /note="DNA/RNA"
  modified_base (12)..(12): 5-methyl modified nucleotide
  modified_base (14)..(14): bicyclic nucleic acid (BNA)
  modified_base (15)..(15): bicyclic nucleic acid (BNA)
aaggaagauggcatt

SEQ ID NO: 19238 - DNA, 14 bp, Artificial Sequence
  source: /note="Description of Artificial Sequence: Synthetic oligonucleotide"
  source: /note="Description of Combined DNA/RNA Molecule: Synthetic oligonucleotide"
  source: /note="DNA/RNA"
  modified_base (12)..(12): 5-methyl modified nucleotide
  modified_base (13)..(13): bicyclic nucleic acid (BNA)
  modified_base (14)..(14): bicyclic nucleic acid (BNA)
aaggaagauggcat

SEQ ID NO: 19239 - RNA, 13 nt, Artificial Sequence
  source: /note="Description of Artificial Sequence: Synthetic oligonucleotide"
  source: /note="RNA"
  modified_base (12)..(12): 5-methyl bicyclic nucleic acid
  modified_base (13)..(13): bicyclic nucleic acid (BNA)
aaggaagauggca

SEQ ID NO: 19240 - RNA, 12 nt, Artificial Sequence
  source: /note="Description of Artificial Sequence: Synthetic oligonucleotide"
  source: /note="RNA"
  modified_base (11)..(11): bicyclic nucleic acid (BNA)
  modified_base (12)..(12): 5-methyl bicyclic nucleic acid
aaggaagauggc

SEQ ID NO: 19241 - RNA, 11 nt, Artificial Sequence
  source: /note="Description of Artificial Sequence: Synthetic oligonucleotide"
  source: /note="RNA"
  modified_base (10)..(10): bicyclic nucleic acid (BNA)
  modified_base (11)..(11): bicyclic nucleic acid (BNA)
aaggaagaugg

SEQ ID NO: 19242 - DNA, 10 bp, Artificial Sequence
  source: /note="Description of Artificial Sequence: Synthetic oligonucleotide"
  source: /note="DNA/RNA"
  modified_base (9)..(9): bicyclic nucleic acid (BNA)
  modified_base (10)..(10): bicyclic nucleic acid (BNA)
aaggaagatg

SEQ ID NO: 19243 - DNA, 9 bp, Artificial Sequence
  source: /note="Description of Artificial Sequence: Synthetic oligonucleotide"
  source: /note="DNA/RNA"
  modified_base (8)..(8): bicyclic nucleic acid (BNA)
  modified_base (9)..(9): bicyclic nucleic acid (BNA)
aaggaagat

SEQ ID NO: 19244 - RNA, 8 nt, Artificial Sequence
  source: /note="Description of Artificial Sequence: Synthetic oligonucleotide"
  source: /note="RNA/Antisense Oligonucleotide"
  modified_base (7)..(7): bicyclic nucleic acid (BNA)
  modified_base (8)..(8): bicyclic nucleic acid (BNA)
aaggaaga

SEQ ID NO: 19245 - RNA, 19 nt, Artificial Sequence
  source: /note="Description of Artificial Sequence: Synthetic oligonucleotide"
  source: /note="RNA"
  modified_base (11)..(11): 5-methyl modified nucleotide
  modified_base (16)..(16): 5-methyl modified nucleotide
  modified_base (18)..(18): bicyclic nucleic acid (BNA)
  modified_base (19)..(19): bicyclic nucleic acid (BNA)
aggaagauggcauuucuag

SEQ ID NO: 19246 - DNA, 18 bp, Artificial Sequence
  source: /note="Description of Artificial Sequence: Synthetic oligonucleotide"
  source: /note="Description of Combined DNA/RNA Molecule: Synthetic oligonucleotide"
  source: /note="DNA/RNA"
  modified_base (11)..(11): 5-methyl modified nucleotide
  modified_base (16)..(16): 5-methyl modified nucleotide
  modified_base (17)..(17): bicyclic nucleic acid (BNA)
  modified_base (18)..(18): bicyclic nucleic acid (BNA)
aggaagauggcauuucta

SEQ ID NO: 19247 - DNA, 17 bp, Artificial Sequence
  source: /note="Description of Artificial Sequence: Synthetic oligonucleotide"
  source: /note="Description of Combined DNA/RNA Molecule: Synthetic oligonucleotide"
  source: /note="DNA/RNA"
  modified_base (11)..(11): 5-methyl modified nucleotide
  modified_base (16)..(16): 5-methyl bicyclic nucleic acid
  modified_base (17)..(17): bicyclic nucleic acid (BNA)
aggaagauggcauuuct

SEQ ID NO: 19248 - DNA, 16 bp, Artificial Sequence
  source: /note="Description of Artificial Sequence: Synthetic oligonucleotide"
  source: /note="Description of Combined DNA/RNA Molecule: Synthetic oligonucleotide"
  source: /note="DNA/RNA"
  modified_base (11)..(11): 5-methyl modified nucleotide
  modified_base (15)..(15): bicyclic nucleic acid (BNA)
  modified_base (16)..(16): 5-methyl bicyclic nucleic acid
aggaagauggcauutc

SEQ ID NO: 19249 - DNA, 15 bp, Artificial Sequence
  source: /note="Description of Artificial Sequence: Synthetic oligonucleotide"
  source: /note="Description of Combined DNA/RNA Molecule: Synthetic oligonucleotide"
  source: /note="DNA/RNA"
  modified_base (11)..(11): 5-methyl modified nucleotide
  modified_base (14)..(14): bicyclic nucleic acid (BNA)
  modified_base (15)..(15): bicyclic nucleic acid (BNA)
aggaagauggcautt

SEQ ID NO: 19250 - DNA, 14 bp, Artificial Sequence
  source: /note="Description of Artificial Sequence: Synthetic oligonucleotide"
  source: /note="Description of Combined DNA/RNA Molecule: Synthetic oligonucleotide"
  source: /note="DNA/RNA"
  modified_base (11)..(11): 5-methyl modified nucleotide
  modified_base (13)..(13): bicyclic nucleic acid (BNA)
  modified_base (14)..(14): bicyclic nucleic acid (BNA)
aggaagauggcatt

SEQ ID NO: 19251 - DNA, 13 bp, Artificial Sequence
  source: /note="Description of Artificial Sequence: Synthetic oligonucleotide"
  source: /note="Description of Combined DNA/RNA Molecule: Synthetic oligonucleotide"
  source: /note="DNA/RNA"
  modified_base (11)..(11): 5-methyl modified nucleotide
  modified_base (12)..(12): bicyclic nucleic acid (BNA)
  modified_base (13)..(13): bicyclic nucleic acid (BNA)
aggaagauggcat

SEQ ID NO: 19252 - RNA, 12 nt, Artificial Sequence
  source: /note="Description of Artificial Sequence: Synthetic oligonucleotide"
  source: /note="RNA"
  modified_base (11)..(11): 5-methyl bicyclic nucleic acid
  modified_base (12)..(12): bicyclic nucleic acid (BNA)
aggaagauggca

SEQ ID NO: 19253 - RNA, 10 nt, Artificial Sequence
  source: /note="Description of Artificial Sequence: Synthetic oligonucleotide"
  source: /note="RNA"
  modified_base (9)..(9): bicyclic nucleic acid (BNA)
  modified_base (10)..(10): bicyclic nucleic acid (BNA)
aggaagaugg

SEQ ID NO: 19254 - DNA, 9 bp, Artificial Sequence
  source: /note="Description of Artificial Sequence: Synthetic oligonucleotide"
  source: /note="DNA/RNA"
  modified_base (8)..(8): bicyclic nucleic acid (BNA)
  modified_base (9)..(9): bicyclic nucleic acid (BNA)
aggaagatg

SEQ ID NO: 19255 - DNA, 8 bp, Artificial Sequence
  source: /note="Description of Artificial Sequence: Synthetic oligonucleotide"
  source: /note="DNA/RNA"
  modified_base (7)..(7): bicyclic nucleic acid (BNA)
  modified_base (8)..(8): bicyclic nucleic acid (BNA)
aggaagat

SEQ ID NO: 19256 - RNA, 18 nt, Artificial Sequence
  source: /note="Description of Artificial Sequence: Synthetic oligonucleotide"
  source: /note="RNA"
  modified_base (10)..(10): 5-methyl modified nucleotide
  modified_base (15)..(15): 5-methyl modified nucleotide
  modified_base (17)..(17): bicyclic nucleic acid (BNA)
  modified_base (18)..(18): bicyclic nucleic acid (BNA)
ggaagauggcauuucuag

SEQ ID NO: 19257 - DNA, 17 bp, Artificial Sequence
  source: /note="Description of Artificial Sequence: Synthetic oligonucleotide"
  source: /note="Description of Combined DNA/RNA Molecule: Synthetic oligonucleotide"
  source: /note="DNA/RNA"
  modified_base (10)..(10): 5-methyl modified nucleotide
  modified_base (15)..(15): 5-methyl modified nucleotide
  modified_base (16)..(16): bicyclic nucleic acid (BNA)
  modified_base (17)..(17): bicyclic nucleic acid (BNA)
ggaagauggcauuucta

SEQ ID NO: 19258 - DNA, 16 bp, Artificial Sequence
  source: /note="Description of Artificial Sequence: Synthetic oligonucleotide"
  source: /note="Description of Combined DNA/RNA Molecule: Synthetic oligonucleotide"
  source: /note="DNA/RNA"
  modified_base (10)..(10): 5-methyl modified nucleotide
  modified_base (15)..(15): 5-methyl bicyclic nucleic acid
  modified_base (16)..(16): bicyclic nucleic acid (BNA)
ggaagauggcauuuct

SEQ ID NO: 19259 - DNA, 15 bp, Artificial Sequence
  source: /note="Description of Artificial Sequence: Synthetic oligonucleotide"
  source: /note="Description of Combined DNA/RNA Molecule: Synthetic oligonucleotide"
  source: /note="DNA/RNA"
  modified_base (10)..(10): 5-methyl modified nucleotide
  modified_base (14)..(14): bicyclic nucleic acid (BNA)
  modified_base (15)..(15): 5-methyl bicyclic nucleic acid
ggaagauggcauutc

SEQ ID NO: 19260 - DNA, 14 bp, Artificial Sequence
  source: /note="Description of Artificial Sequence: Synthetic oligonucleotide"
  source: /note="Description of Combined DNA/RNA Molecule: Synthetic oligonucleotide"
  source: /note="DNA/RNA"
  modified_base (10)..(10): 5-methyl modified nucleotide
  modified_base (13)..(13): bicyclic nucleic acid (BNA)
  modified_base (14)..(14): bicyclic nucleic acid (BNA)
ggaagauggcautt

SEQ ID NO: 19261 - DNA, 13 bp, Artificial Sequence
  source: /note="Description of Artificial Sequence: Synthetic oligonucleotide"
  source: /note="Description of Combined DNA/RNA Molecule: Synthetic oligonucleotide"
  source: /note="DNA/RNA"
  modified_base (10)..(10): 5-methyl modified nucleotide
  modified_base (12)..(12): bicyclic nucleic acid (BNA)
  modified_base (13)..(13): bicyclic nucleic acid (BNA)
ggaagauggcatt

SEQ ID NO: 19262 - DNA, 12 bp, Artificial Sequence
  source: /note="Description of Artificial Sequence: Synthetic oligonucleotide"
  source: /note="Description of Combined DNA/RNA Molecule: Synthetic oligonucleotide"
  source: /note="DNA/RNA"
  modified_base (10)..(10): 5-methyl modified nucleotide
  modified_base (11)..(11): bicyclic nucleic acid (BNA)
  modified_base (12)..(12): bicyclic nucleic acid (BNA)
ggaagauggcat

SEQ ID NO: 19263 - RNA, 11 nt, Artificial Sequence
  source: /note="Description of Artificial Sequence: Synthetic oligonucleotide"
  source: /note="RNA"
  modified_base (10)..(10): 5-methyl bicyclic nucleic acid
  modified_base (11)..(11): bicyclic nucleic acid (BNA)
ggaagauggca

SEQ ID NO: 19264 - RNA, 10 nt, Artificial Sequence
  source: /note="Description of Artificial Sequence: Synthetic oligonucleotide"
  source: /note="RNA"
  modified_base (9)..(9): bicyclic nucleic acid (BNA)
  modified_base (10)..(10): 5-methyl bicyclic nucleic acid
ggaagauggc

SEQ ID NO: 19265 - DNA, 8 bp, Artificial Sequence
  source: /note="Description of Artificial Sequence: Synthetic oligonucleotide"
  source: /note="DNA/RNA"
  modified_base (7)..(7): bicyclic nucleic acid (BNA)
  modified_base (8)..(8): bicyclic nucleic acid (BNA)
ggaagatg

SEQ ID NO: 19266 - RNA, 17 nt, Artificial Sequence
  source: /note="Description of Artificial Sequence: Synthetic oligonucleotide"
  source: /note="RNA"
  modified_base (9)..(9): 5-methyl modified nucleotide
  modified_base (14)..(14): 5-methyl modified nucleotide
  modified_base (16)..(16): bicyclic nucleic acid (BNA)
  modified_base (17)..(17): bicyclic nucleic acid (BNA)
gaagauggcauuucuag

SEQ ID NO: 19267 - DNA, 16 bp, Artificial Sequence
  source: /note="Description of Artificial Sequence: Synthetic oligonucleotide"
  source: /note="Description of Combined DNA/RNA Molecule: Synthetic oligonucleotide"
  source: /note="DNA/RNA"
  modified_base (9)..(9): 5-methyl modified nucleotide
  modified_base (14)..(14): 5-methyl modified nucleotide
  modified_base (15)..(15): bicyclic nucleic acid (BNA)
  modified_base (16)..(16): bicyclic nucleic acid (BNA)
gaagauggcauuucta

SEQ ID NO: 19268 - DNA, 14 bp, Artificial Sequence
  source: /note="Description of Artificial Sequence: Synthetic oligonucleotide"
  source: /note="Description of Combined DNA/RNA Molecule: Synthetic oligonucleotide"
  source: /note="DNA/RNA"
  modified_base (9)..(9): 5-methyl modified nucleotide
  modified_base (13)..(13): bicyclic nucleic acid (BNA)
  modified_base (14)..(14): 5-methyl bicyclic nucleic acid
gaagauggcauutc

SEQ ID NO: 19269 - DNA, 13 bp, Artificial Sequence
  source: /note="Description of Artificial Sequence: Synthetic oligonucleotide"
  source: /note="Description of Combined DNA/RNA Molecule: Synthetic oligonucleotide"
  source: /note="DNA/RNA"
  modified_base (9)..(9): 5-methyl modified nucleotide
  modified_base (12)..(12): bicyclic nucleic acid (BNA)
  modified_base (13)..(13): bicyclic nucleic acid (BNA)
gaagauggcautt

SEQ ID NO: 19270 - DNA, 12 bp, Artificial Sequence
  source: /note="Description of Artificial Sequence: Synthetic oligonucleotide"
  source: /note="Description of Combined DNA/RNA Molecule: Synthetic oligonucleotide"
  source: /note="DNA/RNA"
  modified_base (9)..(9): 5-methyl modified nucleotide
  modified_base (11)..(11): bicyclic nucleic acid (BNA)
  modified_base (12)..(12): bicyclic nucleic acid (BNA)
gaagauggcatt

SEQ ID NO: 19271 - DNA, 11 bp, Artificial Sequence
  source: /note="Description of Artificial Sequence: Synthetic oligonucleotide"
  source: /note="Description of Combined DNA/RNA Molecule: Synthetic oligonucleotide"
  source: /note="DNA/RNA"
  modified_base (9)..(9): 5-methyl modified nucleotide
  modified_base (10)..(10): bicyclic nucleic acid (BNA)
  modified_base (11)..(11): bicyclic nucleic acid (BNA)
gaagauggcat

SEQ ID NO: 19272 - RNA, 10 nt, Artificial Sequence
  source: /note="Description of Artificial Sequence: Synthetic oligonucleotide"
  source: /note="RNA"
  modified_base (9)..(9): 5-methyl bicyclic nucleic acid
  modified_base (10)..(10): bicyclic nucleic acid (BNA)
gaagauggca

SEQ ID NO: 19273 - RNA, 9 nt, Artificial Sequence
  source: /note="Description of Artificial Sequence: Synthetic oligonucleotide"
  source: /note="RNA"
  modified_base (8)..(8): bicyclic nucleic acid (BNA)
  modified_base (9)..(9): 5-methyl bicyclic nucleic acid
gaagauggc

SEQ ID NO: 19274 - RNA, 8 nt, Artificial Sequence
  source: /note="Description of Artificial Sequence: Synthetic oligonucleotide"
  source: /note="RNA"
  modified_base (7)..(7): bicyclic nucleic acid (BNA)
  modified_base (8)..(8): bicyclic nucleic acid (BNA)
gaagaugg

SEQ ID NO: 19275 - RNA, 16 nt, Artificial Sequence
  source: /note="Description of Artificial Sequence: Synthetic oligonucleotide"
  source: /note="RNA"
  modified_base (8)..(8): 5-methyl modified nucleotide
  modified_base (13)..(13): 5-methyl modified nucleotide
  modified_base (15)..(15): bicyclic nucleic acid (BNA)
  modified_base (16)..(16): bicyclic nucleic acid (BNA)
aagauggcauuucuag

SEQ ID NO: 19276 - DNA, 15 bp, Artificial Sequence
  source: /note="Description of Artificial Sequence: Synthetic oligonucleotide"
  source: /note="Description of Combined DNA/RNA Molecule: Synthetic oligonucleotide"
  source: /note="DNA/RNA"
  modified_base (8)..(8): 5-methyl modified nucleotide
  modified_base (13)..(13): 5-methyl modified nucleotide
  modified_base (14)..(14): bicyclic nucleic acid (BNA)
  modified_base (15)..(15): bicyclic nucleic acid (BNA)
aagauggcauuucta

SEQ ID NO: 19277 - DNA, 14 bp, Artificial Sequence
  source: /note="Description of Artificial Sequence: Synthetic oligonucleotide"
  source: /note="Description of Combined DNA/RNA Molecule: Synthetic oligonucleotide"
  source: /note="DNA/RNA"
  modified_base (8)..(8): 5-methyl modified nucleotide
  modified_base (13)..(13): 5-methyl bicyclic nucleic acid
  modified_base (14)..(14): bicyclic nucleic acid (BNA)
aagauggcauuuct

SEQ ID NO: 19278 - DNA, 13 bp, Artificial Sequence
  source: /note="Description of Artificial Sequence: Synthetic oligonucleotide"
  source: /note="Description of Combined DNA/RNA Molecule: Synthetic oligonucleotide"
  source: /note="DNA/RNA"
  modified_base (8)..(8): 5-methyl modified nucleotide
  modified_base (12)..(12): bicyclic nucleic acid (BNA)
  modified_base (13)..(13): 5-methyl bicyclic nucleic acid
aagauggcauutc

SEQ ID NO: 19279 - DNA, 12 bp, Artificial Sequence
  source: /note="Description of Artificial Sequence: Synthetic oligonucleotide"
  source: /note="Description of Combined DNA/RNA Molecule: Synthetic oligonucleotide"
  source: /note="DNA/RNA"
  modified_base (8)..(8): 5-methyl modified nucleotide
  modified_base (11)..(11): bicyclic nucleic acid (BNA)
  modified_base (12)..(12): bicyclic nucleic acid (BNA)
aagauggcautt

SEQ ID NO: 19280 - DNA, 11 bp, Artificial Sequence
  source: /note="Description of Artificial Sequence: Synthetic oligonucleotide"
  source: /note="Description of Combined DNA/RNA Molecule: Synthetic oligonucleotide"
  source: /note="DNA/RNA"
  modified_base (8)..(8): 5-methyl modified nucleotide
  modified_base (10)..(10): bicyclic nucleic acid (BNA)
  modified_base (11)..(11): bicyclic nucleic acid (BNA)
aagauggcatt

SEQ ID NO: 19281 - DNA, 10 bp, Artificial Sequence
  source: /note="Description of Artificial Sequence: Synthetic oligonucleotide"
  source: /note="Description of Combined DNA/RNA Molecule: Synthetic oligonucleotide"
  source: /note="DNA/RNA"
  modified_base (8)..(8): 5-methyl modified nucleotide
  modified_base (9)..(9): bicyclic nucleic acid (BNA)
  modified_base (10)..(10): bicyclic nucleic acid (BNA)
aagauggcat

SEQ ID NO: 19282 - RNA, 9 nt, Artificial Sequence
  source: /note="Description of Artificial Sequence: Synthetic oligonucleotide"
  source: /note="RNA"
  modified_base (8)..(8): 5-methyl bicyclic nucleic acid
  modified_base (9)..(9): bicyclic nucleic acid (BNA)
aagauggca

SEQ ID NO: 19283 - RNA, 8 nt, Artificial Sequence
  source: /note="Description of Artificial Sequence: Synthetic oligonucleotide"
  source: /note="RNA"
  modified_base (7)..(7): bicyclic nucleic acid (BNA)
  modified_base (8)..(8): 5-methyl bicyclic nucleic acid
aagauggc

SEQ ID NO: 19284 - RNA, 15 nt, Artificial Sequence
  source: /note="Description of Artificial Sequence: Synthetic oligonucleotide"
  source: /note="RNA"
  modified_base (7)..(7): 5-methyl modified nucleotide
  modified_base (12)..(12): 5-methyl modified nucleotide
  modified_base (14)..(14): bicyclic nucleic acid (BNA)
  modified_base (15)..(15): bicyclic nucleic acid (BNA)
agauggcauuucuag

SEQ ID NO: 19285 - DNA, 14 bp, Artificial Sequence
  source: /note="Description of Artificial Sequence: Synthetic oligonucleotide"
  source: /note="Description of Combined DNA/RNA Molecule: Synthetic oligonucleotide"
  source: /note="DNA/RNA"
  modified_base (7)..(7): 5-methyl modified nucleotide
  modified_base (12)..(12): 5-methyl modified nucleotide
  modified_base (13)..(13): bicyclic nucleic acid (BNA)
  modified_base (14)..(14): bicyclic nucleic acid (BNA)
agauggcauuucta

SEQ ID NO: 19286 - DNA, 13 bp, Artificial Sequence
  source: /note="Description of Artificial Sequence: Synthetic oligonucleotide"
  source: /note="Description of Combined DNA/RNA Molecule: Synthetic oligonucleotide"
  source: /note="DNA/RNA"
  modified_base (7)..(7): 5-methyl modified nucleotide
  modified_base (12)..(12): 5-methyl bicyclic nucleic acid
  modified_base (13)..(13): bicyclic nucleic acid (BNA)
agauggcauuuct

SEQ ID NO: 19287 - DNA, 12 bp, Artificial Sequence
  source: /note="Description of Artificial Sequence: Synthetic oligonucleotide"
  source: /note="Description of Combined DNA/RNA Molecule: Synthetic oligonucleotide"
  source: /note="DNA/RNA"
  modified_base (7)..(7): 5-methyl modified nucleotide
  modified_base (11)..(11): bicyclic nucleic acid (BNA)
  modified_base (12)..(12): 5-methyl bicyclic nucleic acid
agauggcauutc

SEQ ID NO: 19288 - DNA, 11 bp, Artificial Sequence
  source: /note="Description of Artificial Sequence: Synthetic oligonucleotide"
  source: /note="Description of Combined DNA/RNA Molecule: Synthetic oligonucleotide"
  source: /note="DNA/RNA"
  modified_base (7)..(7): 5-methyl modified nucleotide
  modified_base (10)..(10): bicyclic nucleic acid (BNA)
  modified_base (11)..(11): bicyclic nucleic acid (BNA)
agauggcautt

SEQ ID NO: 19289 - DNA, 10 bp, Artificial Sequence
  source: /note="Description of Artificial Sequence: Synthetic oligonucleotide"
  source: /note="Description of Combined DNA/RNA Molecule: Synthetic oligonucleotide"
  source: /note="DNA/RNA"
  modified_base (7)..(7): 5-methyl modified nucleotide
  modified_base (9)..(9): bicyclic nucleic acid (BNA)
  modified_base (10)..(10): bicyclic nucleic acid (BNA)
agauggcatt

SEQ ID NO: 19290 - DNA, 9 bp, Artificial Sequence
  source: /note="Description of Artificial Sequence: Synthetic oligonucleotide"
  source: /note="Description of Combined DNA/RNA Molecule: Synthetic oligonucleotide"
  source: /note="DNA/RNA"
  modified_base (7)..(7): 5-methyl modified nucleotide
  modified_base (8)..(8): bicyclic nucleic acid (BNA)
  modified_base (9)..(9): bicyclic nucleic acid (BNA)
agauggcat

SEQ ID NO: 19291 - RNA, 8 nt, Artificial Sequence
  source: /note="Description of Artificial Sequence: Synthetic oligonucleotide"
  source: /note="RNA"
  modified_base (7)..(7): 5-methyl bicyclic nucleic acid
  modified_base (8)..(8): bicyclic nucleic acid (BNA)
agauggca

SEQ ID NO: 19292 - RNA, 30 nt, Artificial Sequence; identical to SEQ ID NO: 284
  source: /note="Description of Artificial Sequence: Synthetic oligonucleotide"
  source: /note="RNA"
  modified_base (1)..(1): 5-methyl modified nucleotide
  modified_base (3)..(3): 5-methyl modified nucleotide
  modified_base (4)..(4): 5-methyl modified nucleotide
  modified_base (7)..(7): 5-methyl modified nucleotide
  modified_base (10)..(10): 5-methyl modified nucleotide
  modified_base (22)..(22): 5-methyl modified nucleotide
  modified_base (27)..(27): 5-methyl modified nucleotide
  modified_base (29)..(29): bicyclic nucleic acid (BNA)
  modified_base (30)..(30): bicyclic nucleic acid (BNA)

SEQ ID NO: 19293 - DNA, 29 bp, Artificial Sequence
  source: /note="Description of Artificial Sequence: Synthetic oligonucleotide"
  source: /note="Description of Combined DNA/RNA Molecule: Synthetic oligonucleotide"
  source: /note="DNA/RNA"
  modified_base (1)..(1): 5-methyl modified nucleotide
  modified_base (3)..(3): 5-methyl modified nucleotide
  modified_base (4)..(4): 5-methyl modified nucleotide
  modified_base (7)..(7): 5-methyl modified nucleotide
  modified_base (10)..(10): 5-methyl modified nucleotide
  modified_base (22)..(22): 5-methyl modified nucleotide
  modified_base (27)..(27): 5-methyl modified nucleotide
  modified_base (28)..(28): bicyclic nucleic acid (BNA)
  modified_base (29)..(29): bicyclic nucleic acid (BNA)
cuccaacaucaaggaagauggcauuucta

SEQ ID NO: 19294 - DNA, 28 bp, Artificial Sequence
  source: /note="Description of Artificial Sequence: Synthetic oligonucleotide"
  source: /note="Description of Combined DNA/RNA Molecule: Synthetic oligonucleotide"
  source: /note="DNA/RNA"
  modified_base (1)..(1): 5-methyl modified nucleotide
  modified_base (3)..(3): 5-methyl modified nucleotide
  modified_base (4)..(4): 5-methyl modified nucleotide
  modified_base (7)..(7): 5-methyl modified nucleotide
  modified_base (10)..(10): 5-methyl modified nucleotide
  modified_base (22)..(22): 5-methyl modified nucleotide
  modified_base (27)..(27): 5-methyl bicyclic nucleic acid
  modified_base (28)..(28): bicyclic nucleic acid (BNA)
cuccaacaucaaggaagauggcauuuct

SEQ ID NO: 19295 - DNA, 27 bp, Artificial Sequence
  source: /note="Description of Artificial Sequence: Synthetic oligonucleotide"
  source: /note="Description of Combined DNA/RNA Molecule: Synthetic oligonucleotide"
  source: /note="DNA/RNA"
  modified_base (1)..(1): 5-methyl modified nucleotide
  modified_base (3)..(3): 5-methyl modified nucleotide
  modified_base (4)..(4): 5-methyl modified nucleotide
  modified_base (7)..(7): 5-methyl modified nucleotide
  modified_base (10)..(10): 5-methyl modified nucleotide
  modified_base (22)..(22): 5-methyl modified nucleotide
  modified_base (26)..(26): bicyclic nucleic acid (BNA)
  modified_base (27)..(27): 5-methyl bicyclic nucleic acid
cuccaacaucaaggaagauggcauutc

SEQ ID NO: 19296 - DNA, 26 bp, Artificial Sequence
  source: /note="Description of Artificial Sequence: Synthetic oligonucleotide"
  source: /note="Description of Combined DNA/RNA Molecule: Synthetic oligonucleotide"
  source: /note="DNA/RNA"
  modified_base (1)..(1): 5-methyl modified nucleotide
  modified_base (3)..(3): 5-methyl modified nucleotide
  modified_base (4)..(4): 5-methyl modified nucleotide
  modified_base (7)..(7): 5-methyl modified nucleotide
  modified_base (10)..(10): 5-methyl modified nucleotide
  modified_base (22)..(22): 5-methyl modified nucleotide
  modified_base (25)..(25): bicyclic nucleic acid (BNA)
  modified_base (26)..(26): bicyclic nucleic acid (BNA)
cuccaacaucaaggaagauggcautt

SEQ ID NO: 19297 - DNA, 25 bp, Artificial Sequence
  source: /note="Description of Artificial Sequence: Synthetic oligonucleotide"
  source: /note="Description of Combined DNA/RNA Molecule: Synthetic oligonucleotide"
  source: /note="DNA/RNA"
  modified_base (1)..(1): 5-methyl modified nucleotide
  modified_base (3)..(3): 5-methyl modified nucleotide
  modified_base (4)..(4): 5-methyl modified nucleotide
  modified_base (7)..(7): 5-methyl modified nucleotide
  modified_base (10)..(10): 5-methyl modified nucleotide
  modified_base (22)..(22): 5-methyl modified nucleotide
  modified_base (24)..(24): bicyclic nucleic acid (BNA)
  modified_base (25)..(25): bicyclic nucleic acid (BNA)
cuccaacaucaaggaagauggcatt

SEQ ID NO: 19298 - DNA, 24 bp, Artificial Sequence
  source: /note="Description of Artificial Sequence: Synthetic oligonucleotide"
  source: /note="Description of Combined DNA/RNA Molecule: Synthetic oligonucleotide"
  source: /note="DNA/RNA"
  modified_base (1)..(1): 5-methyl modified nucleotide
  modified_base (3)..(3): 5-methyl modified nucleotide
  modified_base (4)..(4): 5-methyl modified nucleotide
  modified_base (7)..(7): 5-methyl modified nucleotide
  modified_base (10)..(10): 5-methyl modified nucleotide
  modified_base (22)..(22): 5-methyl modified nucleotide
  modified_base (23)..(23): bicyclic nucleic acid (BNA)
  modified_base (24)..(24): bicyclic nucleic acid (BNA)
cuccaacaucaaggaagauggcat

SEQ ID NO: 19299 - RNA, 23 nt, Artificial Sequence
  source: /note="Description of Artificial Sequence: Synthetic oligonucleotide"
  source: /note="RNA"
  modified_base (1)..(1): 5-methyl modified nucleotide
  modified_base (3)..(3): 5-methyl modified nucleotide
  modified_base (4)..(4): 5-methyl modified nucleotide
  modified_base (7)..(7): 5-methyl modified nucleotide
  modified_base (10)..(10): 5-methyl modified nucleotide
  modified_base (22)..(22): 5-methyl bicyclic nucleic acid
  modified_base (23)..(23): bicyclic nucleic acid (BNA)
cuccaacaucaaggaagauggca

SEQ ID NO: 19300 - RNA, 22 nt, Artificial Sequence
  source: /note="Description of Artificial Sequence: Synthetic oligonucleotide"
  source: /note="RNA"
  modified_base (1)..(1): 5-methyl modified nucleotide
  modified_base (3)..(3): 5-methyl modified nucleotide
  modified_base (4)..(4): 5-methyl modified nucleotide
  modified_base (7)..(7): 5-methyl modified nucleotide
  modified_base (10)..(10): 5-methyl modified nucleotide
  modified_base (21)..(21): bicyclic nucleic acid (BNA)
  modified_base (22)..(22): 5-methyl bicyclic nucleic acid
cuccaacaucaaggaagauggc

SEQ ID NO: 19301 - RNA, 21 nt, Artificial Sequence
  source: /note="Description of Artificial Sequence: Synthetic oligonucleotide"
  source: /note="RNA"
  modified_base (1)..(1): 5-methyl modified nucleotide
  modified_base (3)..(3): 5-methyl modified nucleotide
  modified_base (4)..(4): 5-methyl modified nucleotide
  modified_base (7)..(7): 5-methyl modified nucleotide
  modified_base (10)..(10): 5-methyl modified nucleotide
  modified_base (20)..(20): bicyclic nucleic acid (BNA)
  modified_base (21)..(21): bicyclic nucleic acid (BNA)
cuccaacaucaaggaagaugg

SEQ ID NO: 19302 - DNA, 20 bp, Artificial Sequence
  source: /note="Description of Artificial Sequence: Synthetic oligonucleotide"
  source: /note="Description of Combined DNA/RNA Molecule: Synthetic oligonucleotide"
  source: /note="DNA/RNA"
  modified_base (1)..(1): 5-methyl modified nucleotide
  modified_base (3)..(3): 5-methyl modified nucleotide
  modified_base (4)..(4): 5-methyl modified nucleotide
  modified_base (7)..(7): 5-methyl modified nucleotide
  modified_base (10)..(10): 5-methyl modified nucleotide
  modified_base (19)..(19): bicyclic nucleic acid (BNA)
  modified_base (20)..(20): bicyclic nucleic acid (BNA)
cuccaacaucaaggaagatg

SEQ ID NO: 19303 - DNA, 19 bp, Artificial Sequence
  source: /note="Description of Artificial Sequence: Synthetic oligonucleotide"
  source: /note="Description of Combined DNA/RNA Molecule: Synthetic oligonucleotide"
  source: /note="DNA/RNA"
  modified_base (1)..(1): 5-methyl modified nucleotide
  modified_base (3)..(3): 5-methyl modified nucleotide
  modified_base (4)..(4): 5-methyl modified nucleotide
  modified_base (7)..(7): 5-methyl modified nucleotide
  modified_base (10)..(10): 5-methyl modified nucleotide
  modified_base (18)..(18): bicyclic nucleic acid (BNA)
  modified_base (19)..(19): bicyclic nucleic acid (BNA)
cuccaacaucaaggaagat

SEQ ID NO: 19304 - RNA, 18 nt, Artificial Sequence
  source: /note="Description of Artificial Sequence: Synthetic oligonucleotide"
  source: /note="RNA"
  modified_base (1)..(1): 5-methyl modified nucleotide
  modified_base (3)..(3): 5-methyl modified nucleotide
  modified_base (4)..(4): 5-methyl modified nucleotide
  modified_base (7)..(7): 5-methyl modified nucleotide
  modified_base (10)..(10): 5-methyl modified nucleotide
  modified_base (17)..(17): bicyclic nucleic acid (BNA)
  modified_base (18)..(18): bicyclic nucleic acid (BNA)
cuccaacaucaaggaaga

SEQ ID NO: 19305 - RNA, 17 nt, Artificial Sequence
  source: /note="Description of Artificial Sequence: Synthetic oligonucleotide"
  source: /note="RNA"
  modified_base (1)..(1): 5-methyl modified nucleotide
  modified_base (3)..(3): 5-methyl modified nucleotide
  modified_base (4)..(4): 5-methyl modified nucleotide
  modified_base (7)..(7): 5-methyl modified nucleotide
  modified_base (10)..(10): 5-methyl modified nucleotide
  modified_base (16)..(16): bicyclic nucleic acid (BNA)
  modified_base (17)..(17): bicyclic nucleic acid (BNA)
cuccaacaucaaggaag

SEQ ID NO: 19306 - RNA, 29 nt, Artificial Sequence
  source: /note="Description of Artificial Sequence: Synthetic oligonucleotide"
  source: /note="RNA"
  modified_base (2)..(2): 5-methyl modified nucleotide
  modified_base (3)..(3): 5-methyl modified nucleotide
  modified_base (6)..(6): 5-methyl modified nucleotide
  modified_base (9)..(9): 5-methyl modified nucleotide
  modified_base (21)..(21): 5-methyl modified nucleotide
  modified_base (26)..(26): 5-methyl modified nucleotide
  modified_base (28)..(28): bicyclic nucleic acid (BNA)
  modified_base (29)..(29): bicyclic nucleic acid (BNA)
uccaacaucaaggaagauggcauuucuag

SEQ ID NO: 19307 - DNA, 28 bp, Artificial Sequence
  source: /note="Description of Artificial Sequence: Synthetic oligonucleotide"
  source: /note="Description of Combined DNA/RNA Molecule: Synthetic oligonucleotide"
  source: /note="DNA/RNA"
  modified_base (2)..(2): 5-methyl modified nucleotide
  modified_base (3)..(3): 5-methyl modified nucleotide
  modified_base (6)..(6): 5-methyl modified nucleotide
  modified_base (9)..(9): 5-methyl modified nucleotide
  modified_base (21)..(21): 5-methyl modified nucleotide
  modified_base (26)..(26): 5-methyl modified nucleotide
  modified_base (27)..(27): bicyclic nucleic acid (BNA)
  modified_base (28)..(28): bicyclic nucleic acid (BNA)
uccaacaucaaggaagauggcauuucta

SEQ ID NO: 19308 - DNA, 27 bp, Artificial Sequence
  source: /note="Description of Artificial Sequence: Synthetic oligonucleotide"
  source: /note="Description of Combined DNA/RNA Molecule: Synthetic oligonucleotide"
  source: /note="DNA/RNA"
  modified_base (2)..(2): 5-methyl modified nucleotide
  modified_base (3)..(3): 5-methyl modified nucleotide
  modified_base (6)..(6): 5-methyl modified nucleotide
  modified_base (9)..(9): 5-methyl modified nucleotide
  modified_base (21)..(21): 5-methyl modified nucleotide
  modified_base (26)..(26): 5-methyl bicyclic nucleic acid
  modified_base (27)..(27): bicyclic nucleic acid (BNA)
uccaacaucaaggaagauggcauuuct

SEQ ID NO: 19309 - DNA, 26 bp, Artificial Sequence
  source: /note="Description of Artificial Sequence: Synthetic oligonucleotide"
  source: /note="Description of Combined DNA/RNA Molecule: Synthetic oligonucleotide"
  source: /note="DNA/RNA"
  modified_base (2)..(2): 5-methyl modified nucleotide
  modified_base (3)..(3): 5-methyl modified nucleotide
  modified_base (6)..(6): 5-methyl modified nucleotide
  modified_base (9)..(9): 5-methyl modified nucleotide
  modified_base (21)..(21): 5-methyl modified nucleotide
  modified_base (25)..(25): bicyclic nucleic acid (BNA)
  modified_base (26)..(26): 5-methyl bicyclic nucleic acid
uccaacaucaaggaagauggcauutc

SEQ ID NO: 19310 - DNA, 25 bp, Artificial Sequence
  source: /note="Description of Artificial Sequence: Synthetic oligonucleotide"
  source: /note="Description of Combined DNA/RNA Molecule: Synthetic oligonucleotide"
  source: /note="DNA/RNA"
  modified_base (2)..(2): 5-methyl modified nucleotide
  modified_base (3)..(3): 5-methyl modified nucleotide
  modified_base (6)..(6): 5-methyl modified nucleotide
  modified_base (9)..(9): 5-methyl modified nucleotide
  modified_base (21)..(21): 5-methyl modified nucleotide
  modified_base (24)..(24): bicyclic nucleic acid (BNA)
  modified_base (25)..(25): bicyclic nucleic acid (BNA)
uccaacaucaaggaagauggcautt

SEQ ID NO: 19311 - DNA, 24 bp, Artificial Sequence
  source: /note="Description of Artificial Sequence: Synthetic oligonucleotide"
  source: /note="Description of Combined DNA/RNA Molecule: Synthetic oligonucleotide"
  source: /note="DNA/RNA"
  modified_base (2)..(2): 5-methyl modified nucleotide
  modified_base (3)..(3): 5-methyl modified nucleotide
  modified_base (6)..(6): 5-methyl modified nucleotide
  modified_base (9)..(9): 5-methyl modified nucleotide
  modified_base (21)..(21): 5-methyl modified nucleotide
  modified_base (23)..(23): bicyclic nucleic acid (BNA)
  modified_base (24)..(24): bicyclic nucleic acid (BNA)
uccaacaucaaggaagauggcatt

SEQ ID NO: 19312 - DNA, 23 bp, Artificial Sequence
  source: /note="Description of Artificial Sequence: Synthetic oligonucleotide"
  source: /note="Description of Combined DNA/RNA Molecule: Synthetic oligonucleotide"
  source: /note="DNA/RNA"
  modified_base (2)..(2): 5-methyl modified nucleotide
  modified_base (3)..(3): 5-methyl modified nucleotide
  modified_base (6)..(6): 5-methyl modified nucleotide
  modified_base (9)..(9): 5-methyl modified nucleotide
  modified_base (21)..(21): 5-methyl modified nucleotide
  modified_base (22)..(22): bicyclic nucleic acid (BNA)
  modified_base (23)..(23): bicyclic nucleic acid (BNA)
uccaacaucaaggaagauggcat

SEQ ID NO: 19313 - RNA, 22 nt, Artificial Sequence
  source: /note="Description of Artificial Sequence: Synthetic oligonucleotide"
  source: /note="RNA"
  modified_base (2)..(2): 5-methyl modified nucleotide
  modified_base (3)..(3): 5-methyl modified nucleotide
  modified_base (6)..(6): 5-methyl modified nucleotide
  modified_base (9)..(9): 5-methyl modified nucleotide
  modified_base (21)..(21): 5-methyl bicyclic nucleic acid
  modified_base (22)..(22): bicyclic nucleic acid (BNA)
uccaacaucaaggaagauggca

SEQ ID NO: 19314 - RNA, 21 nt, Artificial Sequence
  source: /note="Description of Artificial Sequence: Synthetic oligonucleotide"
  source: /note="RNA"
  modified_base (2)..(2): 5-methyl modified nucleotide
  modified_base (3)..(3): 5-methyl modified nucleotide
  modified_base (6)..(6): 5-methyl modified nucleotide
  modified_base (9)..(9): 5-methyl modified nucleotide
  modified_base (20)..(20): bicyclic nucleic acid (BNA)
  modified_base (21)..(21): 5-methyl bicyclic nucleic acid
uccaacaucaaggaagauggc

SEQ ID NO: 19315 - RNA, 20 nt, Artificial Sequence
  source: /note="Description of Artificial Sequence: Synthetic oligonucleotide"
  source: /note="RNA"
  modified_base (2)..(2): 5-methyl modified nucleotide
  modified_base (3)..(3): 5-methyl modified nucleotide
  modified_base (6)..(6): 5-methyl modified nucleotide
  modified_base (9)..(9): 5-methyl modified nucleotide
  modified_base (19)..(19): bicyclic nucleic acid (BNA)
  modified_base (20)..(20): bicyclic nucleic acid (BNA)
uccaacaucaaggaagaugg

SEQ ID NO: 19316 - DNA, 19 bp, Artificial Sequence
  source: /note="Description of Artificial Sequence: Synthetic oligonucleotide"
  source: /note="Description of Combined DNA/RNA Molecule: Synthetic oligonucleotide"
  source: /note="DNA/RNA"
  modified_base (2)..(2): 5-methyl modified nucleotide
  modified_base (3)..(3): 5-methyl modified nucleotide
  modified_base (6)..(6): 5-methyl modified nucleotide
  modified_base (9)..(9): 5-methyl modified nucleotide
  modified_base (18)..(18): bicyclic nucleic acid (BNA)
  modified_base (19)..(19): bicyclic nucleic acid (BNA)
uccaacaucaaggaagatg

SEQ ID NO: 19317 - DNA, 18 bp, Artificial Sequence
  source: /note="Description of Artificial Sequence: Synthetic oligonucleotide"
  source: /note="Description of Combined DNA/RNA Molecule: Synthetic oligonucleotide"
  source: /note="DNA/RNA"
  modified_base (2)..(2): 5-methyl modified nucleotide
  modified_base (3)..(3): 5-methyl modified nucleotide
  modified_base (6)..(6): 5-methyl modified nucleotide
  modified_base (9)..(9): 5-methyl modified nucleotide
  modified_base (17)..(17): bicyclic nucleic acid (BNA)
  modified_base (18)..(18): bicyclic nucleic acid (BNA)
uccaacaucaaggaagat

SEQ ID NO: 19318 - RNA, 17 nt, Artificial Sequence
  source: /note="Description of Artificial Sequence: Synthetic oligonucleotide"
  source: /note="RNA"
  modified_base (2)..(2): 5-methyl modified nucleotide
  modified_base (3)..(3): 5-methyl modified nucleotide
  modified_base (6)..(6): 5-methyl modified nucleotide
  modified_base (9)..(9): 5-methyl modified nucleotide
  modified_base (16)..(16): bicyclic nucleic acid (BNA)
  modified_base (17)..(17): bicyclic nucleic acid (BNA)
uccaacaucaaggaaga

SEQ ID NO: 19319 - RNA, 16 nt, Artificial Sequence
  source: /note="Description of Artificial Sequence: Synthetic oligonucleotide"
  source: /note="RNA"
  modified_base (2)..(2): 5-methyl modified nucleotide
  modified_base (3)..(3): 5-methyl modified nucleotide
  modified_base (6)..(6): 5-methyl modified nucleotide
  modified_base (9)..(9): 5-methyl modified nucleotide
  modified_base (15)..(15): bicyclic nucleic acid (BNA)
  modified_base (16)..(16): bicyclic nucleic acid (BNA)
uccaacaucaaggaag

SEQ ID NO: 19320 - RNA, 28 nt, Artificial Sequence
  source: /note="Description of Artificial Sequence: Synthetic oligonucleotide"
  source: /note="RNA"
  modified_base (1)..(1): 5-methyl modified nucleotide
  modified_base (2)..(2): 5-methyl modified nucleotide
  modified_base (5)..(5): 5-methyl modified nucleotide
  modified_base (8)..(8): 5-methyl modified nucleotide
  modified_base (20)..(20): 5-methyl modified nucleotide
  modified_base (25)..(25): 5-methyl modified nucleotide
  modified_base (27)..(27): bicyclic nucleic acid (BNA)
  modified_base (28)..(28): bicyclic nucleic acid (BNA)
ccaacaucaaggaagauggcauuucuag

SEQ ID NO: 19321 - DNA, 27 bp, Artificial Sequence
  source: /note="Description of Artificial Sequence: Synthetic oligonucleotide"
  source: /note="Description of Combined DNA/RNA Molecule: Synthetic oligonucleotide"
  source: /note="DNA/RNA"
  modified_base (1)..(1): 5-methyl modified nucleotide
  modified_base (2)..(2): 5-methyl modified nucleotide
  modified_base (5)..(5): 5-methyl modified nucleotide
  modified_base (8)..(8): 5-methyl modified nucleotide
  modified_base (20)..(20): 5-methyl modified nucleotide
  modified_base (25)..(25): 5-methyl modified nucleotide
  modified_base (26)..(26): bicyclic nucleic acid (BNA)
  modified_base (27)..(27): bicyclic nucleic acid (BNA)
ccaacaucaaggaagauggcauuucta

SEQ ID NO: 19322 - DNA, 26 bp, Artificial Sequence
  source: /note="Description of Artificial Sequence: Synthetic oligonucleotide"
  source: /note="Description of Combined DNA/RNA Molecule: Synthetic oligonucleotide"
  source: /note="DNA/RNA"
  modified_base (1)..(1): 5-methyl modified nucleotide
  modified_base (2)..(2): 5-methyl modified nucleotide
  modified_base (5)..(5): 5-methyl modified nucleotide
  modified_base (8)..(8): 5-methyl modified nucleotide
  modified_base (20)..(20): 5-methyl modified nucleotide
  modified_base (25)..(25): 5-methyl bicyclic nucleic acid
  modified_base (26)..(26): bicyclic nucleic acid (BNA)
ccaacaucaaggaagauggcauuuct

SEQ ID NO: 19323 - DNA, 25 bp, Artificial Sequence
  source: /note="Description of Artificial Sequence: Synthetic oligonucleotide"
  source: /note="Description of Combined DNA/RNA Molecule: Synthetic oligonucleotide"
  source: /note="DNA/RNA"
  modified_base (1)..(1): 5-methyl modified nucleotide
  modified_base (2)..(2): 5-methyl modified nucleotide
  modified_base (5)..(5): 5-methyl modified nucleotide
  modified_base (8)..(8): 5-methyl modified nucleotide
  modified_base (20)..(20): 5-methyl modified nucleotide
  modified_base (24)..(24): bicyclic nucleic acid (BNA)
  modified_base (25)..(25): 5-methyl bicyclic nucleic acid
ccaacaucaaggaagauggcauutc

SEQ ID NO: 19324 - DNA, 24 bp, Artificial Sequence
  source: /note="Description of Artificial Sequence: Synthetic oligonucleotide"
  source: /note="Description of Combined DNA/RNA Molecule: Synthetic oligonucleotide"
  source: /note="DNA/RNA"
  modified_base (1)..(1): 5-methyl modified nucleotide
  modified_base (2)..(2): 5-methyl modified nucleotide
  modified_base (5)..(5): 5-methyl modified nucleotide
  modified_base (8)..(8): 5-methyl modified nucleotide
  modified_base (20)..(20): 5-methyl modified nucleotide
  modified_base (23)..(23): bicyclic nucleic acid (BNA)
  modified_base (24)..(24): bicyclic nucleic acid (BNA)
ccaacaucaaggaagauggcautt

SEQ ID NO: 19325 - DNA, 23 bp, Artificial Sequence
  source: /note="Description of Artificial Sequence: Synthetic oligonucleotide"
  source: /note="Description of Combined DNA/RNA Molecule: Synthetic oligonucleotide"
  source: /note="DNA/RNA"
  modified_base (1)..(1): 5-methyl modified nucleotide
  modified_base (2)..(2): 5-methyl modified nucleotide
  modified_base (5)..(5): 5-methyl modified nucleotide
  modified_base (8)..(8): 5-methyl modified nucleotide
  modified_base (20)..(20): 5-methyl modified nucleotide
  modified_base (22)..(22): bicyclic nucleic acid (BNA)
  modified_base (23)..(23): bicyclic nucleic acid (BNA)
ccaacaucaaggaagauggcatt

SEQ ID NO: 19326 - DNA, 22 bp, Artificial Sequence
  source: /note="Description of Artificial Sequence: Synthetic oligonucleotide"
  source: /note="Description of Combined DNA/RNA Molecule: Synthetic oligonucleotide"
  source: /note="DNA/RNA"
  modified_base (1)..(1): 5-methyl modified nucleotide
  modified_base (2)..(2): 5-methyl modified nucleotide
  modified_base (5)..(5): 5-methyl modified nucleotide
  modified_base (8)..(8): 5-methyl modified nucleotide
  modified_base (20)..(20): 5-methyl modified nucleotide
  modified_base (21)..(21): bicyclic nucleic acid (BNA)
  modified_base (22)..(22): bicyclic nucleic acid (BNA)
ccaacaucaaggaagauggcat

SEQ ID NO: 19327 - RNA, 21 nt, Artificial Sequence
  source: /note="Description of Artificial Sequence: Synthetic oligonucleotide"
  source: /note="RNA"
  modified_base (1)..(1): 5-methyl modified nucleotide
  modified_base (2)..(2): 5-methyl modified nucleotide
  modified_base (5)..(5): 5-methyl modified nucleotide
  modified_base (8)..(8): 5-methyl modified nucleotide
  modified_base (20)..(20): 5-methyl bicyclic nucleic acid
  modified_base (21)..(21): bicyclic nucleic acid (BNA)
ccaacaucaaggaagauggca

SEQ ID NO: 19328 - RNA, 20 nt, Artificial Sequence
  source: /note="Description of Artificial Sequence: Synthetic oligonucleotide"
  source: /note="RNA"
  modified_base (1)..(1): 5-methyl modified nucleotide
  modified_base (2)..(2): 5-methyl modified nucleotide
  modified_base (5)..(5): 5-methyl modified nucleotide
  modified_base (8)..(8): 5-methyl modified nucleotide
  modified_base (19)..(19): bicyclic nucleic acid (BNA)
  modified_base (20)..(20): 5-methyl bicyclic nucleic acid
ccaacaucaaggaagauggc

SEQ ID NO: 19329 - RNA, 19 nt, Artificial Sequence
  source: /note="Description of Artificial Sequence: Synthetic oligonucleotide"
  source: /note="RNA"
  modified_base (1)..(1): 5-methyl modified nucleotide
  modified_base (2)..(2): 5-methyl modified nucleotide
  modified_base (5)..(5): 5-methyl modified nucleotide
  modified_base (8)..(8): 5-methyl modified nucleotide
  modified_base (18)..(18): bicyclic nucleic acid (BNA)
  modified_base (19)..(19): bicyclic nucleic acid (BNA)
ccaacaucaaggaagaugg

SEQ ID NO: 19330 - DNA, 18 bp, Artificial Sequence
  source: /note="Description of Artificial Sequence: Synthetic oligonucleotide"
  source: /note="Description of Combined DNA/RNA Molecule: Synthetic oligonucleotide"
  source: /note="DNA/RNA"
  modified_base (1)..(1): 5-methyl modified nucleotide
  modified_base (2)..(2): 5-methyl modified nucleotide
  modified_base (5)..(5): 5-methyl modified nucleotide
  modified_base (8)..(8): 5-methyl modified nucleotide
  modified_base (17)..(17): bicyclic nucleic acid (BNA)
  modified_base (18)..(18): bicyclic nucleic acid (BNA)
ccaacaucaaggaagatg

SEQ ID NO: 19331 - DNA, 17 bp, Artificial Sequence
  source: /note="Description of Artificial Sequence: Synthetic oligonucleotide"
  source: /note="Description of Combined DNA/RNA Molecule: Synthetic oligonucleotide"
  source: /note="DNA/RNA"
  modified_base (1)..(1): 5-methyl modified nucleotide
  modified_base (2)..(2): 5-methyl modified nucleotide
  modified_base (5)..(5): 5-methyl modified nucleotide
  modified_base (8)..(8): 5-methyl modified nucleotide
  modified_base (16)..(16): bicyclic nucleic acid (BNA)
  modified_base (17)..(17): bicyclic nucleic acid (BNA)
ccaacaucaaggaagat

SEQ ID NO: 19332 - RNA, 16 nt, Artificial Sequence
  source: /note="Description of Artificial Sequence: Synthetic oligonucleotide"
  source: /note="RNA"
  modified_base (1)..(1): 5-methyl modified nucleotide
  modified_base (2)..(2): 5-methyl modified nucleotide
  modified_base (5)..(5): 5-methyl modified nucleotide
  modified_base (8)..(8): 5-methyl modified nucleotide
  modified_base (15)..(15): bicyclic nucleic acid (BNA)
  modified_base (16)..(16): bicyclic nucleic acid (BNA)
ccaacaucaaggaaga

SEQ ID NO: 19333 - RNA, 15 nt, Artificial Sequence
  source: /note="Description of Artificial Sequence: Synthetic oligonucleotide"
  source: /note="RNA"
  modified_base (1)..(1): 5-methyl modified nucleotide
  modified_base (2)..(2): 5-methyl modified nucleotide
  modified_base (5)..(5): 5-methyl modified nucleotide
  modified_base (8)..(8): 5-methyl modified nucleotide
  modified_base (14)..(14): bicyclic nucleic acid (BNA)
  modified_base (15)..(15): bicyclic nucleic acid (BNA)
ccaacaucaaggaag

SEQ ID NO: 19334 - RNA, 27 nt, Artificial Sequence
  source: /note="Description of Artificial Sequence: Synthetic oligonucleotide"
  source: /note="RNA"
  modified_base (1)..(1): 5-methyl modified nucleotide
  modified_base (4)..(4): 5-methyl modified nucleotide
  modified_base (7)..(7): 5-methyl modified nucleotide
  modified_base (19)..(19): 5-methyl modified nucleotide
  modified_base (24)..(24): 5-methyl modified nucleotide
  modified_base (26)..(26): bicyclic nucleic acid (BNA)
  modified_base (27)..(27): bicyclic nucleic acid (BNA)
caacaucaaggaagauggcauuucuag

SEQ ID NO: 19335 - DNA, 26 bp, Artificial Sequence
  source: /note="Description of Artificial Sequence: Synthetic oligonucleotide"
  source: /note="Description of Combined DNA/RNA Molecule: Synthetic oligonucleotide"
  source: /note="DNA/RNA"
  modified_base (1)..(1): 5-methyl modified nucleotide
  modified_base (4)..(4): 5-methyl modified nucleotide
  modified_base (7)..(7): 5-methyl modified nucleotide
  modified_base (19)..(19): 5-methyl modified nucleotide
  modified_base (24)..(24): 5-methyl modified nucleotide
  modified_base (25)..(25): bicyclic nucleic acid (BNA)
  modified_base (26)..(26): bicyclic nucleic acid (BNA)
caacaucaaggaagauggcauuucta

SEQ ID NO: 19336 - DNA, 25 bp, Artificial Sequence
  source: /note="Description of Artificial Sequence: Synthetic oligonucleotide"
  source: /note="Description of Combined DNA/RNA Molecule: Synthetic oligonucleotide"
  source: /note="DNA/RNA"
  modified_base (1)..(1): 5-methyl modified nucleotide
  modified_base (4)..(4): 5-methyl modified nucleotide
  modified_base (7)..(7): 5-methyl modified nucleotide
  modified_base (19)..(19): 5-methyl modified nucleotide
  modified_base (24)..(24): 5-methyl bicyclic nucleic acid
  modified_base (25)..(25): bicyclic nucleic acid (BNA)
caacaucaaggaagauggcauuuct

SEQ ID NO: 19337 - DNA, 24 bp, Artificial Sequence
  source: /note="Description of Artificial Sequence: Synthetic oligonucleotide"
  source: /note="Description of Combined DNA/RNA Molecule: Synthetic oligonucleotide"
  source: /note="DNA/RNA"
  modified_base (1)..(1): 5-methyl modified nucleotide
  modified_base (4)..(4): 5-methyl modified nucleotide
  modified_base (7)..(7): 5-methyl modified nucleotide
  modified_base (19)..(19): 5-methyl modified nucleotide
  modified_base (23)..(23): bicyclic nucleic acid (BNA)
  modified_base (24)..(24): 5-methyl bicyclic nucleic acid
caacaucaaggaagauggcauutc

SEQ ID NO: 19338 - DNA, 23 bp, Artificial Sequence
  source: /note="Description of Artificial Sequence: Synthetic oligonucleotide"
  source: /note="Description of Combined DNA/RNA Molecule: Synthetic oligonucleotide"
  source: /note="DNA/RNA"
  modified_base (1)..(1): 5-methyl modified nucleotide
  modified_base (4)..(4): 5-methyl modified nucleotide
  modified_base (7)..(7): 5-methyl modified nucleotide
  modified_base (19)..(19): 5-methyl modified nucleotide
  modified_base (22)..(22): bicyclic nucleic acid (BNA)
  modified_base (23)..(23): bicyclic nucleic acid (BNA)
caacaucaaggaagauggcautt

SEQ ID NO: 19339 - DNA, 22 bp, Artificial Sequence
  source: /note="Description of Artificial Sequence: Synthetic oligonucleotide"
  source: /note="Description of Combined DNA/RNA Molecule: Synthetic oligonucleotide"
  source: /note="DNA/RNA"
  modified_base (1)..(1): 5-methyl modified nucleotide
  modified_base (4)..(4): 5-methyl modified nucleotide
  modified_base (7)..(7): 5-methyl modified nucleotide
  modified_base (19)..(19): 5-methyl modified nucleotide
  modified_base (21)..(21): bicyclic nucleic acid (BNA)
  modified_base (22)..(22): bicyclic nucleic acid (BNA)
caacaucaaggaagauggcatt

SEQ ID NO: 19340 - DNA, 21 bp, Artificial Sequence
  source: /note="Description of Artificial Sequence: Synthetic oligonucleotide"
  source: /note="Description of Combined DNA/RNA Molecule: Synthetic oligonucleotide"
  source: /note="DNA/RNA"
  modified_base (1)..(1): 5-methyl modified nucleotide
  modified_base (4)..(4): 5-methyl modified nucleotide
  modified_base (7)..(7): 5-methyl modified nucleotide
  modified_base (19)..(19): 5-methyl modified nucleotide
  modified_base (20)..(20): bicyclic nucleic acid (BNA)
  modified_base (21)..(21): bicyclic nucleic acid (BNA)
caacaucaaggaagauggcat

SEQ ID NO: 19341 - RNA, 20 nt, Artificial Sequence
  source: /note="Description of Artificial Sequence: Synthetic oligonucleotide"
  source: /note="RNA"
  modified_base (1)..(1): 5-methyl modified nucleotide
  modified_base (4)..(4): 5-methyl modified nucleotide
  modified_base (7)..(7): 5-methyl modified nucleotide
  modified_base (19)..(19): 5-methyl bicyclic nucleic acid
  modified_base (20)..(20): bicyclic nucleic acid (BNA)
caacaucaaggaagauggca

SEQ ID NO: 19342 - RNA, 19 nt, Artificial Sequence
  source: /note="Description of Artificial Sequence: Synthetic oligonucleotide"
  source: /note="RNA"
  modified_base (1)..(1): 5-methyl modified nucleotide
  modified_base (4)..(4): 5-methyl modified nucleotide
  modified_base (7)..(7): 5-methyl modified nucleotide
  modified_base (18)..(18): bicyclic nucleic acid (BNA)
  modified_base (19)..(19): 5-methyl bicyclic nucleic acid
caacaucaaggaagauggc

SEQ ID NO: 19343 - RNA, 18 nt, Artificial Sequence
  source: /note="Description of Artificial Sequence: Synthetic oligonucleotide"
  source: /note="RNA"
  modified_base (1)..(1): 5-methyl modified nucleotide
  modified_base (4)..(4): 5-methyl modified nucleotide
  modified_base (7)..(7): 5-methyl modified nucleotide
  modified_base (17)..(17): bicyclic nucleic acid (BNA)
  modified_base (18)..(18): bicyclic nucleic acid (BNA)
caacaucaaggaagaugg

SEQ ID NO: 19344 - DNA, 17 bp, Artificial Sequence
  source: /note="Description of Artificial Sequence: Synthetic oligonucleotide"
  source: /note="Description of Combined DNA/RNA Molecule: Synthetic oligonucleotide"
  source: /note="DNA/RNA"
  modified_base (1)..(1): 5-methyl modified nucleotide
  modified_base (4)..(4): 5-methyl modified nucleotide
  modified_base (7)..(7): 5-methyl modified nucleotide
  modified_base (16)..(16): bicyclic nucleic acid (BNA)
  modified_base (17)..(17): bicyclic nucleic acid (BNA)
caacaucaaggaagatg

SEQ ID NO: 19345 - DNA, 16 bp, Artificial Sequence
  source: /note="Description of Artificial Sequence: Synthetic oligonucleotide"
  source: /note="Description of Combined DNA/RNA Molecule: Synthetic oligonucleotide"
  source: /note="DNA/RNA"
  modified_base (1)..(1): 5-methyl modified nucleotide
  modified_base (4)..(4): 5-methyl modified nucleotide
  modified_base (7)..(7): 5-methyl modified nucleotide
  modified_base (15)..(15): bicyclic nucleic acid (BNA)
  modified_base (16)..(16): bicyclic nucleic acid (BNA)
caacaucaaggaagat

SEQ ID NO: 19346 - RNA, 15 nt, Artificial Sequence
  source: /note="Description of Artificial Sequence: Synthetic oligonucleotide"
  source: /note="RNA"
  modified_base (1)..(1): 5-methyl modified nucleotide
  modified_base (4)..(4): 5-methyl modified nucleotide
  modified_base (7)..(7): 5-methyl modified nucleotide
  modified_base (14)..(14): bicyclic nucleic acid (BNA)
  modified_base (15)..(15): bicyclic nucleic acid (BNA)
caacaucaaggaaga

SEQ ID NO: 19347 - RNA, 14 nt, Artificial Sequence
  source: /note="Description of Artificial Sequence: Synthetic oligonucleotide"
  source: /note="RNA"
  modified_base (1)..(1): 5-methyl modified nucleotide
  modified_base (4)..(4): 5-methyl modified nucleotide
  modified_base (7)..(7): 5-methyl modified nucleotide
  modified_base (13)..(13): bicyclic nucleic acid (BNA)
  modified_base (14)..(14): bicyclic nucleic acid (BNA)
caacaucaaggaag

SEQ ID NO: 19348 - RNA, 26 nt, Artificial Sequence
  source: /note="Description of Artificial Sequence: Synthetic oligonucleotide"
  source: /note="RNA"
  modified_base (3)..(3): 5-methyl modified nucleotide
  modified_base (6)..(6): 5-methyl modified nucleotide
  modified_base (18)..(18): 5-methyl modified nucleotide
  modified_base (23)..(23): 5-methyl modified nucleotide
  modified_base (25)..(25): bicyclic nucleic acid (BNA)
  modified_base (26)..(26): bicyclic nucleic acid (BNA)
aacaucaaggaagauggcauuucuag

SEQ ID NO: 19349 - DNA, 25 bp, Artificial Sequence
  source: /note="Description of Artificial Sequence: Synthetic oligonucleotide"
  source: /note="Description of Combined DNA/RNA Molecule: Synthetic oligonucleotide"
  source: /note="DNA/RNA"
  modified_base (3)..(3): 5-methyl modified nucleotide
  modified_base (6)..(6): 5-methyl modified nucleotide
  modified_base (18)..(18): 5-methyl modified nucleotide
  modified_base (23)..(23): 5-methyl modified nucleotide
  modified_base (24)..(24): bicyclic nucleic acid (BNA)
  modified_base (25)..(25): bicyclic nucleic acid (BNA)
aacaucaaggaagauggcauuucta

SEQ ID NO: 19350 - DNA, 24 bp, Artificial Sequence
  source: /note="Description of Artificial Sequence: Synthetic oligonucleotide"
  source: /note="Description of Combined DNA/RNA Molecule: Synthetic oligonucleotide"
  source: /note="DNA/RNA"
  modified_base (3)..(3): 5-methyl modified nucleotide
  modified_base (6)..(6): 5-methyl modified nucleotide
  modified_base (18)..(18): 5-methyl modified nucleotide
  modified_base (23)..(23): 5-methyl bicyclic nucleic acid
  modified_base (24)..(24): bicyclic nucleic acid (BNA)
aacaucaaggaagauggcauuuct

SEQ ID NO: 19351 - DNA, 23 bp, Artificial Sequence
  source: /note="Description of Artificial Sequence: Synthetic oligonucleotide"
  source: /note="Description of Combined DNA/RNA Molecule: Synthetic oligonucleotide"
  source: /note="DNA/RNA"
  modified_base (3)..(3): 5-methyl modified nucleotide
  modified_base (6)..(6): 5-methyl modified nucleotide
  modified_base (18)..(18): 5-methyl modified nucleotide
  modified_base (22)..(22): bicyclic nucleic acid (BNA)
  modified_base (23)..(23): 5-methyl bicyclic nucleic acid
aacaucaaggaagauggcauutc

SEQ ID NO: 19352 - DNA, 22 bp, Artificial Sequence
  source: /note="Description of Artificial Sequence: Synthetic oligonucleotide"
  source: /note="Description of Combined DNA/RNA Molecule: Synthetic oligonucleotide"
  source: /note="DNA/RNA"
  modified_base (3)..(3): 5-methyl modified nucleotide
  modified_base (6)..(6): 5-methyl modified nucleotide
  modified_base (18)..(18): 5-methyl modified nucleotide
  modified_base (21)..(21): bicyclic nucleic acid (BNA)
  modified_base (22)..(22): bicyclic nucleic acid (BNA)
aacaucaaggaagauggcautt

SEQ ID NO: 19353 - DNA, 21 bp, Artificial Sequence
  source: /note="Description of Artificial Sequence: Synthetic oligonucleotide"
  source: /note="Description of Combined DNA/RNA Molecule: Synthetic oligonucleotide"
  source: /note="DNA/RNA"
  modified_base (3)..(3): 5-methyl modified nucleotide
  modified_base (6)..(6): 5-methyl modified nucleotide
  modified_base (18)..(18): 5-methyl modified nucleotide
  modified_base (20)..(20): bicyclic nucleic acid (BNA)
  modified_base (21)..(21): bicyclic nucleic acid (BNA)
aacaucaaggaagauggcatt

SEQ ID NO: 19354 - DNA, 20 bp, Artificial Sequence
  source: /note="Description of Artificial Sequence: Synthetic oligonucleotide"
  source: /note="Description of Combined DNA/RNA Molecule: Synthetic oligonucleotide"
  source: /note="DNA/RNA"
  modified_base (3)..(3): 5-methyl modified nucleotide
  modified_base (6)..(6): 5-methyl modified nucleotide
  modified_base (18)..(18): 5-methyl modified nucleotide
  modified_base (19)..(19): bicyclic nucleic acid (BNA)
  modified_base (20)..(20): bicyclic nucleic acid (BNA)
aacaucaaggaagauggcat

SEQ ID NO: 19355 - RNA, 19 nt, Artificial Sequence
  source: /note="Description of Artificial Sequence: Synthetic oligonucleotide"
  source: /note="RNA"
  modified_base (3)..(3): 5-methyl modified nucleotide
  modified_base (6)..(6): 5-methyl modified nucleotide
  modified_base (18)..(18): 5-methyl bicyclic nucleic acid
  modified_base (19)..(19): bicyclic nucleic acid (BNA)
aacaucaaggaagauggca

SEQ ID NO: 19356 - RNA, 18 nt, Artificial Sequence
  source: /note="Description of Artificial Sequence: Synthetic oligonucleotide"
  source: /note="RNA"
  modified_base (3)..(3): 5-methyl modified nucleotide
  modified_base (6)..(6): 5-methyl modified nucleotide
  modified_base (17)..(17): bicyclic nucleic acid (BNA)
  modified_base (18)..(18): 5-methyl bicyclic nucleic acid
aacaucaaggaagauggc

SEQ ID NO: 19357 - RNA, 17 nt, Artificial Sequence
  source: /note="Description of Artificial Sequence: Synthetic oligonucleotide"
  source: /note="RNA"
  modified_base (3)..(3): 5-methyl modified nucleotide
  modified_base (6)..(6): 5-methyl modified nucleotide
  modified_base (16)..(16): bicyclic nucleic acid (BNA)
  modified_base (17)..(17): bicyclic nucleic acid (BNA)
aacaucaaggaagaugg

SEQ ID NO: 19358 - DNA, 16 bp, Artificial Sequence
  source: /note="Description of Artificial Sequence: Synthetic oligonucleotide"
  source: /note="Description of Combined DNA/RNA Molecule: Synthetic oligonucleotide"
  source: /note="DNA/RNA"
  modified_base (3)..(3): 5-methyl modified nucleotide
  modified_base (6)..(6): 5-methyl modified nucleotide
  modified_base (15)..(15): bicyclic nucleic acid (BNA)
  modified_base (16)..(16): bicyclic nucleic acid (BNA)
aacaucaaggaagatg

SEQ ID NO: 19359 - DNA, 15 bp, Artificial Sequence
  source: /note="Description of Artificial Sequence: Synthetic oligonucleotide"
  source: /note="Description of Combined DNA/RNA Molecule: Synthetic oligonucleotide"
  source: /note="DNA/RNA"
  modified_base (3)..(3): 5-methyl modified nucleotide
  modified_base (6)..(6): 5-methyl modified nucleotide
  modified_base (14)..(14): bicyclic nucleic acid (BNA)
  modified_base (15)..(15): bicyclic nucleic acid (BNA)
aacaucaaggaagat

SEQ ID NO: 19360 - RNA, 14 nt, Artificial Sequence
  source: /note="Description of Artificial Sequence: Synthetic oligonucleotide"
  source: /note="RNA"
  modified_base (3)..(3): 5-methyl modified nucleotide
  modified_base (6)..(6): 5-methyl modified nucleotide
  modified_base (13)..(13): bicyclic nucleic acid (BNA)
  modified_base (14)..(14): bicyclic nucleic acid (BNA)
aacaucaaggaaga

SEQ ID NO: 19361 - RNA, 13 nt, Artificial Sequence
  source: /note="Description of Artificial Sequence: Synthetic oligonucleotide"
  source: /note="RNA"
  modified_base (3)..(3): 5-methyl modified nucleotide
  modified_base (6)..(6): 5-methyl modified nucleotide
  modified_base (12)..(12): bicyclic nucleic acid (BNA)
  modified_base (13)..(13): bicyclic nucleic acid (BNA)
aacaucaaggaag

SEQ ID NO: 19362 - RNA, 25 nt, Artificial Sequence
  source: /note="Description of Artificial Sequence: Synthetic oligonucleotide"
  source: /note="RNA"
  modified_base (2)..(2): 5-methyl modified nucleotide
  modified_base (5)..(5): 5-methyl modified nucleotide
  modified_base (17)..(17): 5-methyl modified nucleotide
  modified_base (22)..(22): 5-methyl modified nucleotide
  modified_base (24)..(24): bicyclic nucleic acid (BNA)
  modified_base (25)..(25): bicyclic nucleic acid (BNA)
acaucaaggaagauggcauuucuag

SEQ ID NO: 19363 - DNA, 24 bp, Artificial Sequence
  source: /note="Description of Artificial Sequence: Synthetic oligonucleotide"
  source: /note="Description of Combined DNA/RNA Molecule: Synthetic oligonucleotide"
  source: /note="DNA/RNA"
  modified_base (2)..(2): 5-methyl modified nucleotide
  modified_base (5)..(5): 5-methyl modified nucleotide
  modified_base (17)..(17): 5-methyl modified nucleotide
  modified_base (22)..(22): 5-methyl modified nucleotide
  modified_base (23)..(23): bicyclic nucleic acid (BNA)
  modified_base (24)..(24): bicyclic nucleic acid (BNA)
acaucaaggaagauggcauuucta

SEQ ID NO: 19364 - DNA, 23 bp, Artificial Sequence
  source: /note="Description of Artificial Sequence: Synthetic oligonucleotide"
  source: /note="Description of Combined DNA/RNA Molecule: Synthetic oligonucleotide"
  source: /note="DNA/RNA"
  modified_base (2)..(2): 5-methyl modified nucleotide
  modified_base (5)..(5): 5-methyl modified nucleotide
  modified_base (17)..(17): 5-methyl modified nucleotide
  modified_base (22)..(22): 5-methyl bicyclic nucleic acid
  modified_base (23)..(23): bicyclic nucleic acid (BNA)
acaucaaggaagauggcauuuct

SEQ ID NO: 19365 - DNA, 22 bp, Artificial Sequence
  source: /note="Description of Artificial Sequence: Synthetic oligonucleotide"
  source: /note="Description of Combined DNA/RNA Molecule: Synthetic oligonucleotide"
  source: /note="DNA/RNA"
  modified_base (2)..(2): 5-methyl modified nucleotide
  modified_base (5)..(5): 5-methyl modified nucleotide
  modified_base (17)..(17): 5-methyl modified nucleotide
  modified_base (21)..(21): bicyclic nucleic acid (BNA)
  modified_base (22)..(22): 5-methyl bicyclic nucleic acid
acaucaaggaagauggcauutc

SEQ ID NO: 19366 - DNA, 21 bp, Artificial Sequence
  source: /note="Description of Artificial Sequence: Synthetic oligonucleotide"
  source: /note="Description of Combined DNA/RNA Molecule: Synthetic oligonucleotide"
  source: /note="DNA/RNA"
  modified_base (2)..(2): 5-methyl modified nucleotide
  modified_base (5)..(5): 5-methyl modified nucleotide
  modified_base (17)..(17): 5-methyl modified nucleotide
  modified_base (20)..(20): bicyclic nucleic acid (BNA)
  modified_base (21)..(21): bicyclic nucleic acid (BNA)
acaucaaggaagauggcautt

SEQ ID NO: 19367 - DNA, 20 bp, Artificial Sequence
  source: /note="Description of Artificial Sequence: Synthetic oligonucleotide"
  source: /note="Description of Combined DNA/RNA Molecule: Synthetic oligonucleotide"
  source: /note="DNA/RNA"
  modified_base (2)..(2): 5-methyl modified nucleotide
  modified_base (5)..(5): 5-methyl modified nucleotide
  modified_base (17)..(17): 5-methyl modified nucleotide
  modified_base (19)..(19): bicyclic nucleic acid (BNA)
  modified_base (20)..(20): bicyclic nucleic acid (BNA)
acaucaaggaagauggcatt

SEQ ID NO: 19368 - DNA, 19 bp, Artificial Sequence
  source: /note="Description of Artificial Sequence: Synthetic oligonucleotide"
  source: /note="Description of Combined DNA/RNA Molecule: Synthetic oligonucleotide"
  source: /note="DNA/RNA"
  modified_base (2)..(2): 5-methyl modified nucleotide
  modified_base (5)..(5): 5-methyl modified nucleotide
  modified_base (17)..(17): 5-methyl modified nucleotide
  modified_base (18)..(18): bicyclic nucleic acid (BNA)
  modified_base (19)..(19): bicyclic nucleic acid (BNA)
acaucaaggaagauggcat

SEQ ID NO: 19369 - RNA, 18 nt, Artificial Sequence
  source: /note="Description of Artificial Sequence: Synthetic oligonucleotide"
  source: /note="RNA"
  modified_base (2)..(2): 5-methyl modified nucleotide
  modified_base (5)..(5): 5-methyl modified nucleotide
  modified_base (17)..(17): 5-methyl bicyclic nucleic acid
  modified_base (18)..(18): bicyclic nucleic acid (BNA)
acaucaaggaagauggca

SEQ ID NO: 19370 - RNA, 17 nt, Artificial Sequence
  source: /note="Description of Artificial Sequence: Synthetic oligonucleotide"
  source: /note="RNA"
  modified_base (2)..(2): 5-methyl modified nucleotide
  modified_base (5)..(5): 5-methyl modified nucleotide
  modified_base (16)..(16): bicyclic nucleic acid (BNA)
  modified_base (17)..(17): 5-methyl bicyclic nucleic acid
acaucaaggaagauggc

SEQ ID NO: 19371 - RNA, 16 nt, Artificial Sequence
  source: /note="Description of Artificial Sequence: Synthetic oligonucleotide"
  source: /note="RNA"
  modified_base (2)..(2): 5-methyl modified nucleotide
  modified_base (5)..(5): 5-methyl modified nucleotide
  modified_base (15)..(15): bicyclic nucleic acid (BNA)
  modified_base (16)..(16): bicyclic nucleic acid (BNA)
acaucaaggaagaugg

SEQ ID NO: 19372 - DNA, 15 bp, Artificial Sequence
  source: /note="Description of Artificial Sequence: Synthetic oligonucleotide"
  source: /note="Description of Combined DNA/RNA Molecule: Synthetic oligonucleotide"
  source: /note="DNA/RNA"
  modified_base (2)..(2): 5-methyl modified nucleotide
  modified_base (5)..(5): 5-methyl modified nucleotide
  modified_base (14)..(14): bicyclic nucleic acid (BNA)
  modified_base (15)..(15): bicyclic nucleic acid (BNA)
acaucaaggaagatg

SEQ ID NO: 19373 - DNA, 14 bp, Artificial Sequence
  source: /note="Description of Artificial Sequence: Synthetic oligonucleotide"
  source: /note="Description of Combined DNA/RNA Molecule: Synthetic oligonucleotide"
  source: /note="DNA/RNA"
  modified_base (2)..(2): 5-methyl modified nucleotide
  modified_base (5)..(5): 5-methyl modified nucleotide
  modified_base (13)..(13): bicyclic nucleic acid (BNA)
  modified_base (14)..(14): bicyclic nucleic acid (BNA)
acaucaaggaagat

SEQ ID NO: 19374 - RNA, 13 nt, Artificial Sequence
  source: /note="Description of Artificial Sequence: Synthetic oligonucleotide"
  source: /note="RNA"
  modified_base (2)..(2): 5-methyl modified nucleotide
  modified_base (5)..(5): 5-methyl modified nucleotide
  modified_base (12)..(12): bicyclic nucleic acid (BNA)
  modified_base (13)..(13): bicyclic nucleic acid (BNA)
acaucaaggaaga

SEQ ID NO: 19375 - RNA, 12 nt, Artificial Sequence
  source: /note="Description of Artificial Sequence: Synthetic oligonucleotide"
  source: /note="RNA"
  modified_base (2)..(2): 5-methyl modified nucleotide
  modified_base (5)..(5): 5-methyl modified nucleotide
  modified_base (11)..(11): bicyclic nucleic acid (BNA)
  modified_base (12)..(12): bicyclic nucleic acid (BNA)
acaucaaggaag

SEQ ID NO: 19376 - RNA, 24 nt, Artificial Sequence
  source: /note="Description of Artificial Sequence: Synthetic oligonucleotide"
  source: /note="RNA"
  modified_base (1)..(1): 5-methyl modified nucleotide
  modified_base (4)..(4): 5-methyl modified nucleotide
  modified_base (16)..(16): 5-methyl modified nucleotide
  modified_base (21)..(21): 5-methyl modified nucleotide
  modified_base (23)..(23): bicyclic nucleic acid (BNA)
  modified_base (24)..(24): bicyclic nucleic acid (BNA)
caucaaggaagauggcauuucuag

SEQ ID NO: 19377 - DNA, 23 bp, Artificial Sequence
  source: /note="Description of Artificial Sequence: Synthetic oligonucleotide"
  source: /note="Description of Combined DNA/RNA Molecule: Synthetic oligonucleotide"
  source: /note="DNA/RNA"
  modified_base (1)..(1): 5-methyl modified nucleotide
  modified_base (4)..(4): 5-methyl modified nucleotide
  modified_base (16)..(16): 5-methyl modified nucleotide
  modified_base (21)..(21): 5-methyl modified nucleotide
  modified_base (22)..(22): bicyclic nucleic acid (BNA)
  modified_base (23)..(23): bicyclic nucleic acid (BNA)
caucaaggaagauggcauuucta

SEQ ID NO: 19378 - DNA, 22 bp, Artificial Sequence
  source: /note="Description of Artificial Sequence: Synthetic oligonucleotide"
  source: /note="Description of Combined DNA/RNA Molecule: Synthetic oligonucleotide"
  source: /note="DNA/RNA"
  modified_base (1)..(1): 5-methyl modified nucleotide
  modified_base (4)..(4): 5-methyl modified nucleotide
  modified_base (16)..(16): 5-methyl modified nucleotide
  modified_base (21)..(21): 5-methyl bicyclic nucleic acid
  modified_base (22)..(22): bicyclic nucleic acid (BNA)
caucaaggaagauggcauuuct

SEQ ID NO: 19379 - DNA, 21 bp, Artificial Sequence
  source: /note="Description of Artificial Sequence: Synthetic oligonucleotide"
  source: /note="Description of Combined DNA/RNA Molecule: Synthetic oligonucleotide"
  source: /note="DNA/RNA"
  modified_base (1)..(1): 5-methyl modified nucleotide
  modified_base (4)..(4): 5-methyl modified nucleotide
  modified_base (16)..(16): 5-methyl modified nucleotide
  modified_base (20)..(20): bicyclic nucleic acid (BNA)
  modified_base (21)..(21): 5-methyl bicyclic nucleic acid
caucaaggaagauggcauutc

SEQ ID NO: 19380 - DNA, 20 bp, Artificial Sequence
  source: /note="Description of Artificial Sequence: Synthetic oligonucleotide"
  source: /note="Description of Combined DNA/RNA Molecule: Synthetic oligonucleotide"
  source: /note="DNA/RNA"
  modified_base (1)..(1): 5-methyl modified nucleotide
  modified_base (4)..(4): 5-methyl modified nucleotide
  modified_base (16)..(16): 5-methyl modified nucleotide
  modified_base (19)..(19): bicyclic nucleic acid (BNA)
  modified_base (20)..(20): bicyclic nucleic acid (BNA)
caucaaggaagauggcautt

SEQ ID NO: 19381 - DNA, 19 bp, Artificial Sequence
  source: /note="Description of Artificial Sequence: Synthetic oligonucleotide"
  source: /note="Description of Combined DNA/RNA Molecule: Synthetic oligonucleotide"
  source: /note="DNA/RNA"
  modified_base (1)..(1): 5-methyl modified nucleotide
  modified_base (4)..(4): 5-methyl modified nucleotide
  modified_base (16)..(16): 5-methyl modified nucleotide
  modified_base (18)..(18): bicyclic nucleic acid (BNA)
  modified_base (19)..(19): bicyclic nucleic acid (BNA)
caucaaggaagauggcatt

SEQ ID NO: 19382 - DNA, 18 bp, Artificial Sequence
  source: /note="Description of Artificial Sequence: Synthetic oligonucleotide"
  source: /note="Description of Combined DNA/RNA Molecule: Synthetic oligonucleotide"
  source: /note="DNA/RNA"
  modified_base (1)..(1): 5-methyl modified nucleotide
  modified_base (4)..(4): 5-methyl modified nucleotide
  modified_base (16)..(16): 5-methyl modified nucleotide
  modified_base (17)..(17): bicyclic nucleic acid (BNA)
  modified_base (18)..(18): bicyclic nucleic acid (BNA)
caucaaggaagauggcat

SEQ ID NO: 19383 - RNA, 17 nt, Artificial Sequence
  source: /note="Description of Artificial Sequence: Synthetic oligonucleotide"
  source: /note="RNA"
  modified_base (1)..(1): 5-methyl modified nucleotide
  modified_base (4)..(4): 5-methyl modified nucleotide
  modified_base (16)..(16): 5-methyl bicyclic nucleic acid
  modified_base (17)..(17): bicyclic nucleic acid (BNA)
caucaaggaagauggca

SEQ ID NO: 19384 - RNA, 16 nt, Artificial Sequence
  source: /note="Description of Artificial Sequence: Synthetic oligonucleotide"
  source: /note="RNA"
  modified_base (1)..(1): 5-methyl modified nucleotide
  modified_base (4)..(4): 5-methyl modified nucleotide
  modified_base (15)..(15): bicyclic nucleic acid (BNA)
  modified_base (16)..(16): 5-methyl bicyclic nucleic acid
caucaaggaagauggc

SEQ ID NO: 19385 - RNA, 15 nt, Artificial Sequence
  source: /note="Description of Artificial Sequence: Synthetic oligonucleotide"
  source: /note="RNA"
  modified_base (1)..(1): 5-methyl modified nucleotide
  modified_base (4)..(4): 5-methyl modified nucleotide
  modified_base (14)..(14): bicyclic nucleic acid (BNA)
  modified_base (15)..(15): bicyclic nucleic acid (BNA)
caucaaggaagaugg

SEQ ID NO: 19386 - DNA, 14 bp, Artificial Sequence
  source: /note="Description of Artificial Sequence: Synthetic oligonucleotide"
  source: /note="Description of Combined DNA/RNA Molecule: Synthetic oligonucleotide"
  source: /note="DNA/RNA"
  modified_base (1)..(1): 5-methyl modified nucleotide
  modified_base (4)..(4): 5-methyl modified nucleotide
  modified_base (13)..(13): bicyclic nucleic acid (BNA)
  modified_base (14)..(14): bicyclic nucleic acid (BNA)
caucaaggaagatg

SEQ ID NO: 19387 - DNA, 13 bp, Artificial Sequence
  source: /note="Description of Artificial Sequence: Synthetic oligonucleotide"
  source: /note="Description of Combined DNA/RNA Molecule: Synthetic oligonucleotide"
  source: /note="DNA/RNA"
  modified_base (1)..(1): 5-methyl modified nucleotide
  modified_base (4)..(4): 5-methyl modified nucleotide
  modified_base (12)..(12): bicyclic nucleic acid (BNA)
  modified_base (13)..(13): bicyclic nucleic acid (BNA)
caucaaggaagat

SEQ ID NO: 19388 - RNA, 12 nt, Artificial Sequence
  source: /note="Description of Artificial Sequence: Synthetic oligonucleotide"
  source: /note="RNA"
  modified_base (1)..(1): 5-methyl modified nucleotide
  modified_base (4)..(4): 5-methyl modified nucleotide
  modified_base (11)..(11): bicyclic nucleic acid (BNA)
  modified_base (12)..(12): bicyclic nucleic acid (BNA)
caucaaggaaga

SEQ ID NO: 19389 - RNA, 11 nt, Artificial Sequence
  source: /note="Description of Artificial Sequence: Synthetic oligonucleotide"
  source: /note="RNA"
  modified_base (1)..(1): 5-methyl modified nucleotide
  modified_base (4)..(4): 5-methyl modified nucleotide
  modified_base (10)..(10): bicyclic nucleic acid (BNA)
  modified_base (11)..(11): bicyclic nucleic acid (BNA)
caucaaggaag

SEQ ID NO: 19390 - RNA, 23 nt, Artificial Sequence
  source: /note="Description of Artificial Sequence: Synthetic oligonucleotide"
  source: /note="RNA"
  modified_base (3)..(3): 5-methyl modified nucleotide
  modified_base (15)..(15): 5-methyl modified nucleotide
  modified_base (20)..(20): 5-methyl modified nucleotide
  modified_base (22)..(22): bicyclic nucleic acid (BNA)
  modified_base (23)..(23): bicyclic nucleic acid (BNA)
aucaaggaagauggcauuucuag

SEQ ID NO: 19391 - DNA, 22 bp, Artificial Sequence
  source: /note="Description of Artificial Sequence: Synthetic oligonucleotide"
  source: /note="Description of Combined DNA/RNA Molecule: Synthetic oligonucleotide"
  source: /note="DNA/RNA"
  modified_base (3)..(3): 5-methyl modified nucleotide
  modified_base (15)..(15): 5-methyl modified nucleotide
  modified_base (20)..(20): 5-methyl modified nucleotide
  modified_base (21)..(21): bicyclic nucleic acid (BNA)
  modified_base (22)..(22): bicyclic nucleic acid (BNA)
aucaaggaagauggcauuucta

SEQ ID NO: 19392 - DNA, 21 bp, Artificial Sequence
  source: /note="Description of Artificial Sequence: Synthetic oligonucleotide"
  source: /note="Description of Combined DNA/RNA Molecule: Synthetic oligonucleotide"
  source: /note="DNA/RNA"
  modified_base (3)..(3): 5-methyl modified nucleotide
  modified_base (15)..(15): 5-methyl modified nucleotide
  modified_base (20)..(20): 5-methyl bicyclic nucleic acid
  modified_base (21)..(21): bicyclic nucleic acid (BNA)
aucaaggaagauggcauuuct

SEQ ID NO: 19393 - DNA, 20 bp, Artificial Sequence
  source: /note="Description of Artificial Sequence: Synthetic oligonucleotide"
  source: /note="Description of Combined DNA/RNA Molecule: Synthetic oligonucleotide"
  source: /note="DNA/RNA"
  modified_base (3)..(3): 5-methyl modified nucleotide
  modified_base (15)..(15): 5-methyl modified nucleotide
  modified_base (19)..(19): bicyclic nucleic acid (BNA)
  modified_base (20)..(20): 5-methyl bicyclic nucleic acid
aucaaggaagauggcauutc

SEQ ID NO: 19394 - DNA, 19 bp, Artificial Sequence
  source: /note="Description of Artificial Sequence: Synthetic oligonucleotide"
  source: /note="Description of Combined DNA/RNA Molecule: Synthetic oligonucleotide"
  source: /note="DNA/RNA"
  modified_base (3)..(3): 5-methyl modified nucleotide
  modified_base (15)..(15): 5-methyl modified nucleotide
  modified_base (18)..(18): bicyclic nucleic acid (BNA)
  modified_base (19)..(19): bicyclic nucleic acid (BNA)
aucaaggaagauggcautt

SEQ ID NO: 19395 - DNA, 18 bp, Artificial Sequence
  source: /note="Description of Artificial Sequence: Synthetic oligonucleotide"
  source: /note="Description of Combined DNA/RNA Molecule: Synthetic oligonucleotide"
  source: /note="DNA/RNA"
  modified_base (3)..(3): 5-methyl modified nucleotide
  modified_base (15)..(15): 5-methyl modified nucleotide
  modified_base (17)..(17): bicyclic nucleic acid (BNA)
  modified_base (18)..(18): bicyclic nucleic acid (BNA)
aucaaggaagauggcatt

SEQ ID NO: 19396 - DNA, 17 bp, Artificial Sequence
  source: /note="Description of Artificial Sequence: Synthetic oligonucleotide"
  source: /note="Description of Combined DNA/RNA Molecule: Synthetic oligonucleotide"
  source: /note="DNA/RNA"
  modified_base (3)..(3): 5-methyl modified nucleotide
  modified_base (15)..(15): 5-methyl modified nucleotide
  modified_base (16)..(16): bicyclic nucleic acid (BNA)
  modified_base (17)..(17): bicyclic nucleic acid (BNA)
aucaaggaagauggcat

SEQ ID NO: 19397 - RNA, 16 nt, Artificial Sequence
  source: /note="Description of Artificial Sequence: Synthetic oligonucleotide"
  source: /note="RNA"
  modified_base (3)..(3): 5-methyl modified nucleotide
  modified_base (15)..(15): 5-methyl bicyclic nucleic acid
  modified_base (16)..(16): bicyclic nucleic acid (BNA)
aucaaggaagauggca

SEQ ID NO: 19398 - RNA, 15 nt, Artificial Sequence
  source: /note="Description of Artificial Sequence: Synthetic oligonucleotide"
  source: /note="RNA"
  modified_base (3)..(3): 5-methyl modified nucleotide
  modified_base (14)..(14): bicyclic nucleic acid (BNA)
  modified_base (15)..(15): 5-methyl bicyclic nucleic acid
aucaaggaagauggc

SEQ ID NO: 19399 - RNA, 14 nt, Artificial Sequence
  source: /note="Description of Artificial Sequence: Synthetic oligonucleotide"
  source: /note="RNA"
  modified_base (3)..(3): 5-methyl modified nucleotide
  modified_base (13)..(13): bicyclic nucleic acid (BNA)
  modified_base (14)..(14): bicyclic nucleic acid (BNA)
aucaaggaagaugg

SEQ ID NO: 19400 - DNA, 13 bp, Artificial Sequence
  source: /note="Description of Artificial Sequence: Synthetic oligonucleotide"
  source: /note="Description of Combined DNA/RNA Molecule: Synthetic oligonucleotide"
  source: /note="DNA/RNA"
  modified_base (3)..(3): 5-methyl modified nucleotide
  modified_base (12)..(12): bicyclic nucleic acid (BNA)
  modified_base (13)..(13): bicyclic nucleic acid (BNA)
aucaaggaagatg

SEQ ID NO: 19401 - DNA, 12 bp, Artificial Sequence
  source: /note="Description of Artificial Sequence: Synthetic oligonucleotide"
  source: /note="Description of Combined DNA/RNA Molecule: Synthetic oligonucleotide"
  source: /note="DNA/RNA"
  modified_base (3)..(3): 5-methyl modified nucleotide
  modified_base (11)..(11): bicyclic nucleic acid (BNA)
  modified_base (12)..(12): bicyclic nucleic acid (BNA)
aucaaggaagat

SEQ ID NO: 19402 - RNA, 11 nt, Artificial Sequence
  source: /note="Description of Artificial Sequence: Synthetic oligonucleotide"
  source: /note="RNA"
  modified_base (3)..(3): 5-methyl modified nucleotide
  modified_base (10)..(10): bicyclic nucleic acid (BNA)
  modified_base (11)..(11): bicyclic nucleic acid (BNA)
aucaaggaaga

SEQ ID NO: 19403 - RNA, 10 nt, Artificial Sequence
  source: /note="Description of Artificial Sequence: Synthetic oligonucleotide"
  source: /note="RNA"
  modified_base (3)..(3): 5-methyl modified nucleotide
  modified_base (9)..(9): bicyclic nucleic acid (BNA)
  modified_base (10)..(10): bicyclic nucleic acid (BNA)
aucaaggaag

SEQ ID NO: 19404 - DNA, 23 bp, Artificial Sequence
  source: /note="Description of Artificial Sequence: Synthetic oligonucleotide"
  source: /note="Description of Combined DNA/RNA Molecule: Synthetic oligonucleotide"
  source: /note="DNA/RNA"
  modified_base (1)..(1): 5-methyl modified nucleotide
  modified_base (2)..(2): 5-methyl modified nucleotide
  modified_base (7)..(7): 5-methyl modified nucleotide
  modified_base (13)..(13): 5-methyl modified nucleotide
  modified_base (14)..(14): 5-methyl modified nucleotide
  modified_base (16)..(16): 5-methyl modified nucleotide
  modified_base (17)..(17): 5-methyl modified nucleotide
  modified_base (20)..(20): 5-methyl modified nucleotide
  modified_base (22)..(22): bicyclic nucleic acid (BNA)
  modified_base (23)..(23): 5-methyl bicyclic nucleic acid
ccagagcagguaccuccaacatc

SEQ ID NO: 19405 - RNA, 18 nt, Artificial Sequence
  source: /note="Description of Artificial Sequence: Synthetic oligonucleotide"
  source: /note="RNA"
  modified_base (1)..(1): 5-methyl modified nucleotide
  modified_base (2)..(2): 5-methyl modified nucleotide
  modified_base (7)..(7): 5-methyl modified nucleotide
  modified_base (13)..(13): 5-methyl modified nucleotide
  modified_base (14)..(14): 5-methyl modified nucleotide
  modified_base (16)..(16): 5-methyl modified nucleotide
  modified_base (17)..(17): 5-methyl bicyclic nucleic acid
  modified_base (18)..(18): bicyclic nucleic acid (BNA)
ccagagcagguaccucca

SEQ ID NO: 19406 - DNA, 23 bp, Artificial Sequence
  source: /note="Description of Artificial Sequence: Synthetic oligonucleotide"
  source: /note="Description of Combined DNA/RNA Molecule: Synthetic oligonucleotide"
  source: /note="DNA/RNA"
  modified_base (1)..(1): 5-methyl modified nucleotide
  modified_base (2)..(2): 5-methyl modified nucleotide
  modified_base (4)..(4): 5-methyl modified nucleotide
  modified_base (18)..(18): 5-methyl modified nucleotide
  modified_base (22)..(22): bicyclic nucleic acid (BNA)
  modified_base (23)..(23): bicyclic nucleic acid (BNA)
ccucugugauuuuauaacuugat

SEQ ID NO: 19407 - DNA, 17 bp, Artificial Sequence
  source: /note="Description of Artificial Sequence: Synthetic oligonucleotide"
  source: /note="Description of Combined DNA/RNA Molecule: Synthetic oligonucleotide"
  source: /note="DNA/RNA"
  modified_base (2)..(2): 5-methyl modified nucleotide
  modified_base (4)..(4): 5-methyl modified nucleotide
  modified_base (5)..(5): 5-methyl modified nucleotide
  modified_base (6)..(6): 5-methyl modified nucleotide
  modified_base (8)..(8): 5-methyl modified nucleotide
  modified_base (9)..(9): 5-methyl modified nucleotide
  modified_base (12)..(12): 5-methyl modified nucleotide
  modified_base (14)..(14): 5-methyl modified nucleotide
  modified_base (15)..(15): 5-methyl modified nucleotide
  modified_base (16)..(16): 5-methyl bicyclic nucleic acid
  modified_base (17)..(17): bicyclic nucleic acid (BNA)
ucacccaccaucaccct

SEQ ID NO: 19408 - RNA, 20 nt, Artificial Sequence
  source: /note="Description of Artificial Sequence: Synthetic oligonucleotide"
  source: /note="RNA"
  modified_base (7)..(7): 5-methyl modified nucleotide
  modified_base (8)..(8): 5-methyl modified nucleotide
  modified_base (10)..(10): 5-methyl modified nucleotide
  modified_base (16)..(16): 5-methyl modified nucleotide
  modified_base (18)..(18): 5-methyl modified nucleotide
  modified_base (19)..(19): 5-methyl bicyclic nucleic acid
  modified_base (20)..(20): 5-methyl bicyclic nucleic acid
ugauauccucaaggucaccc

SEQ ID NO: 19409 - DNA, 22 bp, Artificial Sequence
  source: /note="Description of Artificial Sequence: Synthetic oligonucleotide"
  source: /note="Description of Combined DNA/RNA Molecule: Synthetic oligonucleotide"
  source: /note="DNA/RNA"
  modified_base (1)..(1): 5-methyl modified nucleotide
  modified_base (4)..(4): 5-methyl modified nucleotide
  modified_base (13)..(13): 5-methyl modified nucleotide
  modified_base (16)..(16): 5-methyl modified nucleotide
  modified_base (18)..(18): 5-methyl modified nucleotide
  modified_base (21)..(21): bicyclic nucleic acid (BNA)
  modified_base (22)..(22): bicyclic nucleic acid (BNA)
cugcuugaugaucaucucgutg

SEQ ID NO: 19410 - DNA, 18 bp, Artificial Sequence
  source: /note="Description of Artificial Sequence: Synthetic oligonucleotide"
  source: /note="Description of Combined DNA/RNA Molecule: Synthetic oligonucleotide"
  source: /note="DNA/RNA"
  modified_base (1)..(1): 5-methyl modified nucleotide
  modified_base (4)..(4): 5-methyl modified nucleotide
  modified_base (13)..(13): 5-methyl modified nucleotide
  modified_base (16)..(16): 5-methyl modified nucleotide
  modified_base (17)..(17): bicyclic nucleic acid (BNA)
  modified_base (18)..(18): 5-methyl bicyclic nucleic acid
cugcuugaugaucauctc

SEQ ID NO: 19411 - RNA, 19 nt, Artificial Sequence
  source: /note="Description of Artificial Sequence: Synthetic oligonucleotide"
  source: /note="RNA"
  modified_base (5)..(5): 5-methyl modified nucleotide
  modified_base (6)..(6): 5-methyl modified nucleotide
  modified_base (14)..(14): 5-methyl modified nucleotide
  modified_base (15)..(15): 5-methyl modified nucleotide
  modified_base (17)..(17): 5-methyl modified nucleotide
  modified_base (18)..(18): bicyclic nucleic acid (BNA)
  modified_base (19)..(19): bicyclic nucleic acid (BNA)
guuuccuuaguaaccacag

SEQ ID NO: 19412 - RNA, 17 nt, Artificial Sequence
  source: /note="Description of Artificial Sequence: Synthetic oligonucleotide"
  source: /note="RNA"
  modified_base (5)..(5): 5-methyl modified nucleotide
  modified_base (6)..(6): 5-methyl modified nucleotide
  modified_base (14)..(14): 5-methyl modified nucleotide
  modified_base (15)..(15): 5-methyl modified nucleotide
  modified_base (16)..(16): bicyclic nucleic acid (BNA)
  modified_base (17)..(17): 5-methyl bicyclic nucleic acid
guuuccuuaguaaccac

SEQ ID NO: 19413 - DNA, 20 bp, Artificial Sequence
  source: /note="Description of Artificial Sequence: Synthetic oligonucleotide"
  source: /note="Description of Combined DNA/RNA Molecule: Synthetic oligonucleotide"
  source: /note="DNA/RNA"
  source: /note="5' tri-ethylene glycol (TEG)"
  modified_base (2)..(2): 5-methyl modified nucleotide
  modified_base (14)..(14): 5-methyl modified nucleotide
  modified_base (19)..(19): 5-methyl bicyclic nucleic acid
  modified_base (20)..(20): bicyclic nucleic acid (BNA)
ucaaggaagauggcauuuct

SEQ ID NO: 19414 - RNA, 22 nt, Artificial Sequence
  source: /note="Description of Artificial Sequence: Synthetic oligonucleotide"
  source: /note="RNA"
  source: /note="5' tri-ethylene glycol (TEG)"
  modified_base (2)..(2): 5-methyl modified nucleotide
  modified_base (14)..(14): 5-methyl modified nucleotide
  modified_base (19)..(19): 5-methyl modified nucleotide
  modified_base (21)..(21): bicyclic nucleic acid (BNA)
  modified_base (22)..(22): bicyclic nucleic acid (BNA)
ucaaggaagauggcauuucuag

SEQ ID NO: 19415 - RNA, 18 nt, Artificial Sequence
  source: /note="Description of Artificial Sequence: Synthetic oligonucleotide"
  source: /note="RNA"
  source: /note="5' tri-ethylene glycol (TEG)"
  modified_base (9)..(9): 5-methyl modified nucleotide
  modified_base (13)..(13): 5-methyl modified nucleotide
  modified_base (14)..(14): 5-methyl modified nucleotide
  modified_base (17)..(17): bicyclic nucleic acid (BNA)
  modified_base (18)..(18): 5-methyl bicyclic nucleic acid
gguaaguucuguccaagc

SEQ ID NO: 19416 - RNA, 18 nt, Artificial Sequence
  source: /note="Description of Artificial Sequence: Synthetic oligonucleotide"
  source: /note="RNA"
  source: /note="5' tri-ethylene glycol (TEG)"
  modified_base (8)..(8): 5-methyl modified nucleotide
  modified_base (12)..(12): 5-methyl modified nucleotide
  modified_base (13)..(13): 5-methyl modified nucleotide
  modified_base (17)..(17): 5-methyl bicyclic nucleic acid
  modified_base (18)..(18): 5-methyl bicyclic nucleic acid
guaaguucuguccaagcc

SEQ ID NO: 19417 - RNA, 18 nt, Artificial Sequence
  source: /note="Description of Artificial Sequence: Synthetic oligonucleotide"
  source: /note="RNA"
  source: /note="5' tri-ethylene glycol (TEG)"
  modified_base (4)..(4): 5-methyl modified nucleotide
  modified_base (13)..(13): 5-methyl modified nucleotide
  modified_base (17)..(17): 5-methyl bicyclic nucleic acid
  modified_base (18)..(18): 5-methyl bicyclic nucleic acid
agucgguaaguucugucc

SEQ ID NO: 19418 - RNA, 18 nt, Artificial Sequence
  source: /note="Description of Artificial Sequence: Synthetic oligonucleotide"
  source: /note="RNA"
  source: /note="5' tri-ethylene glycol (TEG)"
  modified_base (1)..(1): 5-methyl modified nucleotide
  modified_base (5)..(5): 5-methyl modified nucleotide
  modified_base (6)..(6): 5-methyl modified nucleotide
  modified_base (10)..(10): 5-methyl modified nucleotide
  modified_base (11)..(11): 5-methyl modified nucleotide
  modified_base (12)..(12): 5-methyl modified nucleotide
  modified_base (17)..(17): bicyclic nucleic acid (BNA)
  modified_base (18)..(18): bicyclic nucleic acid (BNA)
cuguccaagcccgguuga

SEQ ID NO: 19419 - RNA, 15 nt, Artificial Sequence
  source: /note="Description of Artificial Sequence: Synthetic oligonucleotide"
  source: /note="RNA"
  source: /note="5' tri-ethylene glycol (TEG)"
  modified_base (7)..(7): 5-methyl modified nucleotide
  modified_base (11)..(11): 5-methyl modified nucleotide
  modified_base (12)..(12): 5-methyl modified nucleotide
  modified_base (14)..(14): bicyclic nucleic acid (BNA)
  modified_base (15)..(15): bicyclic nucleic acid (BNA)
uaaguucuguccaag

SEQ ID NO: 19420 - RNA, 20 nt, Artificial Sequence
  source: /note="Description of Artificial Sequence: Synthetic oligonucleotide"
  source: /note="RNA"
  source: /note="5' tri-ethylene glycol (TEG)"
  modified_base (3)..(3): 5-methyl modified nucleotide
  modified_base (7)..(7): 5-methyl modified nucleotide
  modified_base (8)..(8): 5-methyl modified nucleotide
  modified_base (12)..(12): 5-methyl modified nucleotide
  modified_base (13)..(13): 5-methyl modified nucleotide
  modified_base (14)..(14): 5-methyl modified nucleotide
  modified_base (19)..(19): bicyclic nucleic acid (BNA)
  modified_base (20)..(20): bicyclic nucleic acid (BNA)
uucuguccaagcccgguuga

SEQ ID NO: 19421 - DNA, 19 bp, Artificial Sequence
  source: /note="Description of Artificial Sequence: Synthetic oligonucleotide"
  source: /note="Description of Combined DNA/RNA Molecule: Synthetic oligonucleotide"
  source: /note="DNA/RNA"
  source: /note="5' tri-ethylene glycol (TEG)"
  modified_base (3)..(3): 5-methyl modified nucleotide
  modified_base (7)..(7): 5-methyl modified nucleotide
  modified_base (8)..(8): 5-methyl modified nucleotide
  modified_base (12)..(12): 5-methyl modified nucleotide
  modified_base (13)..(13): 5-methyl modified nucleotide
  modified_base (14)..(14): 5-methyl modified nucleotide
  modified_base (18)..(18): bicyclic nucleic acid (BNA)
  modified_base (19)..(19): bicyclic nucleic acid (BNA)
uucuguccaagcccggutg

SEQ ID NO: 19422 - DNA, 18 bp, Artificial Sequence
  source: /note="Description of Artificial Sequence: Synthetic oligonucleotide"
  source: /note="Description of Combined DNA/RNA Molecule: Synthetic oligonucleotide"
  source: /note="DNA/RNA"
  source: /note="5' tri-ethylene glycol (TEG)"
  modified_base (3)..(3): 5-methyl modified nucleotide
  modified_base (7)..(7): 5-methyl modified nucleotide
  modified_base (8)..(8): 5-methyl modified nucleotide
  modified_base (12)..(12): 5-methyl modified nucleotide
  modified_base (13)..(13): 5-methyl modified nucleotide
  modified_base (14)..(14): 5-methyl modified nucleotide
  modified_base (17)..(17): bicyclic nucleic acid (BNA)
  modified_base (18)..(18): bicyclic nucleic acid (BNA)
uucuguccaagcccggtt

SEQ ID NO: 19423 - DNA, 17 bp, Artificial Sequence
  source: /note="Description of Artificial Sequence: Synthetic oligonucleotide"
  source: /note="Description of Combined DNA/RNA Molecule: Synthetic oligonucleotide"
  source: /note="DNA/RNA"
  source: /note="5' tri-ethylene glycol (TEG)"
  modified_base (3)..(3): 5-methyl modified nucleotide
  modified_base (7)..(7): 5-methyl modified nucleotide
  modified_base (8)..(8): 5-methyl modified nucleotide
  modified_base (12)..(12): 5-methyl modified nucleotide
  modified_base (13)..(13): 5-methyl modified nucleotide
  modified_base (14)..(14): 5-methyl modified nucleotide
  modified_base (16)..(16): bicyclic nucleic acid (BNA)
  modified_base (17)..(17): bicyclic nucleic acid (BNA)
uucuguccaagcccggt

SEQ ID NO: 19424 - RNA, 16 nt, Artificial Sequence
  source: /note="Description of Artificial Sequence: Synthetic oligonucleotide"
  source: /note="RNA"
  source: /note="5' tri-ethylene glycol (TEG)"
  modified_base (3)..(3): 5-methyl modified nucleotide
  modified_base (7)..(7): 5-methyl modified nucleotide
  modified_base (8)..(8): 5-methyl modified nucleotide
  modified_base (12)..(12): 5-methyl modified nucleotide
  modified_base (13)..(13): 5-methyl modified nucleotide
  modified_base (14)..(14): 5-methyl modified nucleotide
  modified_base (15)..(15): bicyclic nucleic acid (BNA)
  modified_base (16)..(16): bicyclic nucleic acid (BNA)
uucuguccaagcccgg

SEQ ID NO: 19425 - RNA, 15 nt, Artificial Sequence
  source: /note="Description of Artificial Sequence: Synthetic oligonucleotide"
  source: /note="RNA"
  source: /note="5' tri-ethylene glycol (TEG)"
  modified_base (3)..(3): 5-methyl modified nucleotide
  modified_base (7)..(7): 5-methyl modified nucleotide
  modified_base (8)..(8): 5-methyl modified nucleotide
  modified_base (12)..(12): 5-methyl modified nucleotide
  modified_base (13)..(13): 5-methyl modified nucleotide
  modified_base (14)..(14): 5-methyl bicyclic nucleic acid
  modified_base (15)..(15): bicyclic nucleic acid (BNA)
uucuguccaagcccg

SEQ ID NO: 19426 - RNA, 14 nt, Artificial Sequence
  source: /note="Description of Artificial Sequence: Synthetic oligonucleotide"
  source: /note="RNA"
  source: /note="5' tri-ethylene glycol (TEG)"
  modified_base (3)..(3): 5-methyl modified nucleotide
  modified_base (7)..(7): 5-methyl modified nucleotide
  modified_base (8)..(8): 5-methyl modified nucleotide
  modified_base (12)..(12): 5-methyl modified nucleotide
  modified_base (13)..(13): 5-methyl bicyclic nucleic acid
  modified_base (14)..(14): 5-methyl bicyclic nucleic acid
uucuguccaagccc

SEQ ID NO: 19427 - RNA, 13 nt, Artificial Sequence
  source: /note="Description of Artificial Sequence: Synthetic oligonucleotide"
  source: /note="RNA"
  source: /note="5' tri-ethylene glycol (TEG)"
  modified_base (3)..(3): 5-methyl modified nucleotide
  modified_base (7)..(7): 5-methyl modified nucleotide
  modified_base (8)..(8): 5-methyl modified nucleotide
  modified_base (12)..(12): 5-methyl bicyclic nucleic acid
  modified_base (13)..(13): 5-methyl bicyclic nucleic acid
uucuguccaagcc

SEQ ID NO: 19428 - RNA, 12 nt, Artificial Sequence
  source: /note="Description of Artificial Sequence: Synthetic oligonucleotide"
  source: /note="RNA"
  source: /note="5' tri-ethylene glycol (TEG)"
  modified_base (3)..(3): 5-methyl modified nucleotide
  modified_base (7)..(7): 5-methyl modified nucleotide
  modified_base (8)..(8): 5-methyl modified nucleotide
  modified_base (11)..(11): bicyclic nucleic acid (BNA)
  modified_base (12)..(12): 5-methyl bicyclic nucleic acid
uucuguccaagc

SEQ ID NO: 19429 - RNA, 11 nt, Artificial Sequence
  source: /note="Description of Artificial Sequence: Synthetic oligonucleotide"
  source: /note="RNA"
  source: /note="5' tri-ethylene glycol (TEG)"
  modified_base (3)..(3): 5-methyl modified nucleotide
  modified_base (7)..(7): 5-methyl modified nucleotide
  modified_base (8)..(8): 5-methyl modified nucleotide
  modified_base (10)..(10): bicyclic nucleic acid (BNA)
  modified_base (11)..(11): bicyclic nucleic acid (BNA)
uucuguccaag

SEQ ID NO: 19430 - RNA, 10 nt, Artificial Sequence
  source: /note="Description of Artificial Sequence: Synthetic oligonucleotide"
  source: /note="RNA"
  source: /note="5' tri-ethylene glycol (TEG)"
  modified_base (3)..(3): 5-methyl modified nucleotide
  modified_base (7)..(7): 5-methyl modified nucleotide
  modified_base (8)..(8): 5-methyl modified nucleotide
  modified_base (9)..(9): bicyclic nucleic acid (BNA)
  modified_base (10)..(10): bicyclic nucleic acid (BNA)
uucuguccaa

SEQ ID NO: 19431 - RNA, 9 nt, Artificial Sequence
  source: /note="Description of Artificial Sequence: Synthetic oligonucleotide"
  source: /note="RNA"
  source: /note="5' tri-ethylene glycol (TEG)"
  modified_base (3)..(3): 5-methyl modified nucleotide
  modified_base (7)..(7): 5-methyl modified nucleotide
  modified_base (8)..(8): 5-methyl bicyclic nucleic acid
  modified_base (9)..(9): bicyclic nucleic acid (BNA)
uucugucca

SEQ ID NO: 19432 - RNA, 8 nt, Artificial Sequence
  source: /note="Description of Artificial Sequence: Synthetic oligonucleotide"
  source: /note="RNA"
  source: /note="5' tri-ethylene glycol (TEG)"
  modified_base (3)..(3): 5-methyl modified nucleotide
  modified_base (7)..(7): 5-methyl bicyclic nucleic acid
  modified_base (8)..(8): 5-methyl bicyclic nucleic acid
uucugucc

SEQ ID NO: 19433 - RNA, 19 nt, Artificial Sequence
  source: /note="Description of Artificial Sequence: Synthetic oligonucleotide"
  source: /note="RNA"
  source: /note="5' tri-ethylene glycol (TEG)"
  modified_base (2)..(2): 5-methyl modified nucleotide
  modified_base (6)..(6): 5-methyl modified nucleotide
  modified_base (7)..(7): 5-methyl modified nucleotide
  modified_base (11)..(11): 5-methyl modified nucleotide
  modified_base (12)..(12): 5-methyl modified nucleotide
  modified_base (13)..(13): 5-methyl modified nucleotide
  modified_base (18)..(18): bicyclic nucleic acid (BNA)
  modified_base (19)..(19): bicyclic nucleic acid (BNA)
ucuguccaagcccgguuga

SEQ ID NO: 19434 - DNA, 18 bp, Artificial Sequence
  source: /note="Description of Artificial Sequence: Synthetic oligonucleotide"
  source: /note="Description of Combined DNA/RNA Molecule: Synthetic oligonucleotide"
  source: /note="DNA/RNA"
  source: /note="5' tri-ethylene glycol (TEG)"
  modified_base (2)..(2): 5-methyl modified nucleotide
  modified_base (6)..(6): 5-methyl modified nucleotide
  modified_base (7)..(7): 5-methyl modified nucleotide
  modified_base (11)..(11): 5-methyl modified nucleotide
  modified_base (12)..(12): 5-methyl modified nucleotide
  modified_base (13)..(13): 5-methyl modified nucleotide
  modified_base (17)..(17): bicyclic nucleic acid (BNA)
  modified_base (18)..(18): bicyclic nucleic acid (BNA)
ucuguccaagcccggutg

SEQ ID NO: 19435 - DNA, 17 bp, Artificial Sequence
  source: /note="Description of Artificial Sequence: Synthetic oligonucleotide"
  source: /note="Description of Combined DNA/RNA Molecule: Synthetic oligonucleotide"
  source: /note="DNA/RNA"
  source: /note="5' tri-ethylene glycol (TEG)"
  modified_base (2)..(2): 5-methyl modified nucleotide
  modified_base (6)..(6): 5-methyl modified nucleotide
  modified_base (7)..(7): 5-methyl modified nucleotide
  modified_base (11)..(11): 5-methyl modified nucleotide
  modified_base (12)..(12): 5-methyl modified nucleotide
  modified_base (13)..(13): 5-methyl modified nucleotide
  modified_base (16)..(16): bicyclic nucleic acid (BNA)
  modified_base (17)..(17): bicyclic nucleic acid (BNA)
ucuguccaagcccggtt

SEQ ID NO: 19436 - DNA, 16 bp, Artificial Sequence
  source: /note="Description of Artificial Sequence: Synthetic oligonucleotide"
  source: /note="Description of Combined DNA/RNA Molecule: Synthetic oligonucleotide"
  source: /note="DNA/RNA"
  source: /note="5' tri-ethylene glycol (TEG)"
  modified_base (2)..(2): 5-methyl modified nucleotide
  modified_base (6)..(6): 5-methyl modified nucleotide
  modified_base (7)..(7): 5-methyl modified nucleotide
  modified_base (11)..(11): 5-methyl modified nucleotide
  modified_base (12)..(12): 5-methyl modified nucleotide
  modified_base (13)..(13): 5-methyl modified nucleotide
  modified_base (15)..(15): bicyclic nucleic acid (BNA)
  modified_base (16)..(16): bicyclic nucleic acid (BNA)
ucuguccaagcccggt

SEQ ID NO: 19437 - RNA, 15 nt, Artificial Sequence
  source: /note="Description of Artificial Sequence: Synthetic oligonucleotide"
  source: /note="RNA"
  source: /note="5' tri-ethylene glycol (TEG)"
  modified_base (2)..(2): 5-methyl modified nucleotide
  modified_base (6)..(6): 5-methyl modified nucleotide
  modified_base (7)..(7): 5-methyl modified nucleotide
  modified_base (11)..(11): 5-methyl modified nucleotide
  modified_base (12)..(12): 5-methyl modified nucleotide
  modified_base (13)..(13): 5-methyl modified nucleotide
  modified_base (14)..(14): bicyclic nucleic acid (BNA)
  modified_base (15)..(15): bicyclic nucleic acid (BNA)
ucuguccaagcccgg

SEQ ID NO: 19438 - RNA, 14 nt, Artificial Sequence
  source: /note="Description of Artificial Sequence: Synthetic oligonucleotide"
  source: /note="RNA"
  source: /note="5' tri-ethylene glycol (TEG)"
  modified_base (2)..(2): 5-methyl modified nucleotide
  modified_base (6)..(6): 5-methyl modified nucleotide
  modified_base (7)..(7): 5-methyl modified nucleotide
  modified_base (11)..(11): 5-methyl modified nucleotide
  modified_base (12)..(12): 5-methyl modified nucleotide
  modified_base (13)..(13): 5-methyl bicyclic nucleic acid
  modified_base (14)..(14): bicyclic nucleic acid (BNA)
ucuguccaagcccg

SEQ ID NO: 19439 - RNA, 13 nt, Artificial Sequence
  source: /note="Description of Artificial Sequence: Synthetic oligonucleotide"
  source: /note="RNA"
  source: /note="5' tri-ethylene glycol (TEG)"
  modified_base (2)..(2): 5-methyl modified nucleotide
  modified_base (6)..(6): 5-methyl modified nucleotide
  modified_base (7)..(7): 5-methyl modified nucleotide
  modified_base (11)..(11): 5-methyl modified nucleotide
  modified_base (12)..(12): 5-methyl bicyclic nucleic acid
  modified_base (13)..(13): 5-methyl bicyclic nucleic acid
ucuguccaagccc

SEQ ID NO: 19440 - RNA, 12 nt, Artificial Sequence
  source: /note="Description of Artificial Sequence: Synthetic oligonucleotide"
  source: /note="RNA"
  source: /note="5' tri-ethylene glycol (TEG)"
  modified_base (2)..(2): 5-methyl modified nucleotide
  modified_base (6)..(6): 5-methyl modified nucleotide
  modified_base (7)..(7): 5-methyl modified nucleotide
  modified_base (11)..(11): 5-methyl bicyclic nucleic acid
  modified_base (12)..(12): 5-methyl bicyclic nucleic acid
ucuguccaagcc

SEQ ID NO: 19441 - RNA, 11 nt, Artificial Sequence
  source: /note="Description of Artificial Sequence: Synthetic oligonucleotide"
  source: /note="RNA"
  source: /note="5' tri-ethylene glycol (TEG)"
  modified_base (2)..(2): 5-methyl modified nucleotide
  modified_base (6)..(6): 5-methyl modified nucleotide
  modified_base (7)..(7): 5-methyl modified nucleotide
  modified_base (10)..(10): bicyclic nucleic acid (BNA)
  modified_base (11)..(11): 5-methyl bicyclic nucleic acid
ucuguccaagc

SEQ ID NO: 19442 - RNA, 10 nt, Artificial Sequence
  source: /note="Description of Artificial Sequence: Synthetic oligonucleotide"
  source: /note="RNA"
  source: /note="5' tri-ethylene glycol (TEG)"
  modified_base (2)..(2): 5-methyl modified nucleotide
  modified_base (6)..(6): 5-methyl modified nucleotide
  modified_base (7)..(7): 5-methyl modified nucleotide
  modified_base (9)..(9): bicyclic nucleic acid (BNA)
  modified_base (10)..(10): bicyclic nucleic acid (BNA)
ucuguccaag

SEQ ID NO: 19443 - RNA, 9 nt, Artificial Sequence
  source: /note="Description of Artificial Sequence: Synthetic oligonucleotide"
  source: /note="RNA"
  source: /note="5' tri-ethylene glycol (TEG)"
  modified_base (2)..(2): 5-methyl modified nucleotide
  modified_base (6)..(6): 5-methyl modified nucleotide
  modified_base (7)..(7): 5-methyl modified nucleotide
  modified_base (8)..(8): bicyclic nucleic acid (BNA)
  modified_base (9)..(9): bicyclic nucleic acid (BNA)
ucuguccaa

SEQ ID NO: 19444 - RNA, 8 nt, Artificial Sequence
  source: /note="Description of Artificial Sequence: Synthetic oligonucleotide"
  source: /note="RNA"
  source: /note="5' tri-ethylene glycol (TEG)"
  modified_base (2)..(2): 5-methyl modified nucleotide
  modified_base (6)..(6): 5-methyl modified nucleotide
  modified_base (7)..(7): 5-methyl bicyclic nucleic acid
  modified_base (8)..(8): bicyclic nucleic acid (BNA)
ucugucca

SEQ ID NO: 19445 - DNA, 17 bp, Artificial Sequence
  source: /note="Description of Artificial Sequence: Synthetic oligonucleotide"
  source: /note="Description of Combined DNA/RNA Molecule: Synthetic oligonucleotide"
  source: /note="DNA/RNA"
  source: /note="5' tri-ethylene glycol (TEG)"
  modified_base (1)..(1): 5-methyl modified nucleotide
  modified_base (5)..(5): 5-methyl modified nucleotide
  modified_base (6)..(6): 5-methyl modified nucleotide
  modified_base (10)..(10): 5-methyl modified nucleotide
  modified_base (11)..(11): 5-methyl modified nucleotide
  modified_base (12)..(12): 5-methyl modified nucleotide
  modified_base (16)..(16): bicyclic nucleic acid (BNA)
  modified_base (17)..(17): bicyclic nucleic acid (BNA)
cuguccaagcccggutg

SEQ ID NO: 19446 - DNA, 16 bp, Artificial Sequence
  source: /note="Description of Artificial Sequence: Synthetic oligonucleotide"
  source: /note="Description of Combined DNA/RNA Molecule: Synthetic oligonucleotide"
  source: /note="DNA/RNA"
  source: /note="5' tri-ethylene glycol (TEG)"
  modified_base (1)..(1): 5-methyl modified nucleotide
  modified_base (5)..(5): 5-methyl modified nucleotide
  modified_base (6)..(6): 5-methyl modified nucleotide
  modified_base (10)..(10): 5-methyl modified nucleotide
  modified_base (11)..(11): 5-methyl modified nucleotide
  modified_base (12)..(12): 5-methyl modified nucleotide
  modified_base (15)..(15): bicyclic nucleic acid (BNA)
  modified_base (16)..(16): bicyclic nucleic acid (BNA)
cuguccaagcccggtt

SEQ ID NO: 19447 - DNA, 15 bp, Artificial Sequence
  source: /note="Description of Artificial Sequence: Synthetic oligonucleotide"
  source: /note="Description of Combined DNA/RNA Molecule: Synthetic oligonucleotide"
  source: /note="DNA/RNA"
  source: /note="5' tri-ethylene glycol (TEG)"
  modified_base (1)..(1): 5-methyl modified nucleotide
  modified_base (5)..(5): 5-methyl modified nucleotide
  modified_base (6)..(6): 5-methyl modified nucleotide
  modified_base (10)..(10): 5-methyl modified nucleotide
  modified_base (11)..(11): 5-methyl modified nucleotide
  modified_base (12)..(12): 5-methyl modified nucleotide
  modified_base (14)..(14): bicyclic nucleic acid (BNA)
  modified_base (15)..(15): bicyclic nucleic acid (BNA)
cuguccaagcccggt

SEQ ID NO: 19448 - RNA, 14 nt, Artificial Sequence
  source: /note="Description of Artificial Sequence: Synthetic oligonucleotide"
  source: /note="RNA"
  source: /note="5' tri-ethylene glycol (TEG)"
  modified_base (1)..(1): 5-methyl modified nucleotide
  modified_base (5)..(5): 5-methyl modified nucleotide
  modified_base (6)..(6): 5-methyl modified nucleotide
  modified_base (10)..(10): 5-methyl modified nucleotide
  modified_base (11)..(11): 5-methyl modified nucleotide
  modified_base (12)..(12): 5-methyl modified nucleotide
  modified_base (13)..(13): bicyclic nucleic acid (BNA)
  modified_base (14)..(14): bicyclic nucleic acid (BNA)
cuguccaagcccgg

SEQ ID NO: 19449 - RNA, 13 nt, Artificial Sequence
  source: /note="Description of Artificial Sequence: Synthetic oligonucleotide"
  source: /note="RNA"
  source: /note="5' tri-ethylene glycol (TEG)"
  modified_base (1)..(1): 5-methyl modified nucleotide
  modified_base (5)..(5): 5-methyl modified nucleotide
  modified_base (6)..(6): 5-methyl modified nucleotide
  modified_base (10)..(10): 5-methyl modified nucleotide
  modified_base (11)..(11): 5-methyl modified nucleotide
  modified_base (12)..(12): 5-methyl bicyclic nucleic acid
  modified_base (13)..(13): bicyclic nucleic acid (BNA)
cuguccaagcccg

SEQ ID NO: 19450 - RNA, 12 nt, Artificial Sequence
  source: /note="Description of Artificial Sequence: Synthetic oligonucleotide"
  source: /note="RNA"
  source: /note="5' tri-ethylene glycol (TEG)"
  modified_base (1)..(1): 5-methyl modified nucleotide
  modified_base (5)..(5): 5-methyl modified nucleotide
  modified_base (6)..(6): 5-methyl modified nucleotide
  modified_base (10)..(10): 5-methyl modified nucleotide
  modified_base (11)..(11): 5-methyl bicyclic nucleic acid
  modified_base (12)..(12): 5-methyl bicyclic nucleic acid
cuguccaagccc

SEQ ID NO: 19451 - RNA, 11 nt, Artificial Sequence
  source: /note="Description of Artificial Sequence: Synthetic oligonucleotide"
  source: /note="RNA"
  source: /note="5' tri-ethylene glycol (TEG)"
  modified_base (1)..(1): 5-methyl modified nucleotide
  modified_base (5)..(5): 5-methyl modified nucleotide
  modified_base (6)..(6): 5-methyl modified nucleotide
  modified_base (10)..(10): 5-methyl bicyclic nucleic acid
  modified_base (11)..(11): 5-methyl bicyclic nucleic acid
cuguccaagcc

SEQ ID NO: 19452 - RNA, 10 nt, Artificial Sequence
  source: /note="Description of Artificial Sequence: Synthetic oligonucleotide"
  source: /note="RNA"
  source: /note="5' tri-ethylene glycol (TEG)"
  modified_base (1)..(1): 5-methyl modified nucleotide
  modified_base (5)..(5): 5-methyl modified nucleotide
  modified_base (6)..(6): 5-methyl modified nucleotide
  modified_base (9)..(9): bicyclic nucleic acid (BNA)
  modified_base (10)..(10): 5-methyl bicyclic nucleic acid
cuguccaagc

SEQ ID NO: 19453 - RNA, 9 nt, Artificial Sequence
  source: /note="Description of Artificial Sequence: Synthetic oligonucleotide"
  source: /note="RNA"
  source: /note="5' tri-ethylene glycol (TEG)"
  modified_base (1)..(1): 5-methyl modified nucleotide
  modified_base (5)..(5): 5-methyl modified nucleotide
  modified_base (6)..(6): 5-methyl modified nucleotide
  modified_base (8)..(8): bicyclic nucleic acid (BNA)
  modified_base (9)..(9): bicyclic nucleic acid (BNA)
cuguccaag

SEQ ID NO: 19454 - RNA, 8 nt, Artificial Sequence
  source: /note="Description of Artificial Sequence: Synthetic oligonucleotide"
  source: /note="RNA"
  source: /note="5' tri-ethylene glycol (TEG)"
  modified_base (1)..(1): 5-methyl modified nucleotide
  modified_base (5)..(5): 5-methyl modified nucleotide
  modified_base (6)..(6): 5-methyl modified nucleotide
  modified_base (7)..(7): bicyclic nucleic acid (BNA)
  modified_base (8)..(8): bicyclic nucleic acid (BNA)
cuguccaa

SEQ ID NO: 19455 - DNA, 20 bp, Artificial Sequence
  source: /note="Description of Artificial Sequence: Synthetic oligonucleotide"
  source: /note="Description of Combined DNA/RNA Molecule: Synthetic oligonucleotide"
  source: /note="DNA/RNA"
  source: /note="5' tri-ethylene glycol (TEG)"
  modified_base (4)..(4): 5-methyl modified nucleotide
  modified_base (8)..(8): 5-methyl modified nucleotide
  modified_base (9)..(9): 5-methyl modified nucleotide
  modified_base (13)..(13): 5-methyl modified nucleotide
  modified_base (14)..(14): 5-methyl modified nucleotide
  modified_base (15)..(15): 5-methyl modified nucleotide
  modified_base (19)..(19): bicyclic nucleic acid (BNA)
  modified_base (20)..(20): bicyclic nucleic acid (BNA)
guucuguccaagcccggutg

SEQ ID NO: 19456 - DNA, 19 bp, Artificial Sequence
  source: /note="Description of Artificial Sequence: Synthetic oligonucleotide"
  source: /note="Description of Combined DNA/RNA Molecule: Synthetic oligonucleotide"
  source: /note="DNA/RNA"
  source: /note="5' tri-ethylene glycol (TEG)"
  modified_base (4)..(4): 5-methyl modified nucleotide
  modified_base (8)..(8): 5-methyl modified nucleotide
  modified_base (9)..(9): 5-methyl modified nucleotide
  modified_base (13)..(13): 5-methyl modified nucleotide
  modified_base (14)..(14): 5-methyl modified nucleotide
  modified_base (15)..(15): 5-methyl modified nucleotide
  modified_base (18)..(18): bicyclic nucleic acid (BNA)
  modified_base (19)..(19): bicyclic nucleic acid (BNA)
guucuguccaagcccggtt

SEQ ID NO: 19457 - DNA, 18 bp, Artificial Sequence
  source: /note="Description of Artificial Sequence: Synthetic oligonucleotide"
  source: /note="Description of Combined DNA/RNA Molecule: Synthetic oligonucleotide"
  source: /note="DNA/RNA"
  source: /note="5' tri-ethylene glycol (TEG)"
  modified_base (4)..(4): 5-methyl modified nucleotide
  modified_base (8)..(8): 5-methyl modified nucleotide
  modified_base (9)..(9): 5-methyl modified nucleotide
  modified_base (13)..(13): 5-methyl modified nucleotide
  modified_base (14)..(14): 5-methyl modified nucleotide
  modified_base (15)..(15): 5-methyl modified nucleotide
  modified_base (17)..(17): bicyclic nucleic acid (BNA)
  modified_base (18)..(18): bicyclic nucleic acid (BNA)
guucuguccaagcccggt

SEQ ID NO: 19458 - RNA, 17 nt, Artificial Sequence
  source: /note="Description of Artificial Sequence: Synthetic oligonucleotide"
  source: /note="RNA"
  source: /note="5' tri-ethylene glycol (TEG)"
  modified_base (4)..(4): 5-methyl modified nucleotide
  modified_base (8)..(8): 5-methyl modified nucleotide
  modified_base (9)..(9): 5-methyl modified nucleotide
  modified_base (13)..(13): 5-methyl modified nucleotide
  modified_base (14)..(14): 5-methyl modified nucleotide
  modified_base (15)..(15): 5-methyl modified nucleotide
  modified_base (16)..(16): bicyclic nucleic acid (BNA)
  modified_base (17)..(17): bicyclic nucleic acid (BNA)
guucuguccaagcccgg

SEQ ID NO: 19459 - RNA, 16 nt, Artificial Sequence
  source: /note="Description of Artificial Sequence: Synthetic oligonucleotide"
  source: /note="RNA"
  source: /note="5' tri-ethylene glycol (TEG)"
  modified_base (4)..(4): 5-methyl modified nucleotide
  modified_base (8)..(8): 5-methyl modified nucleotide
  modified_base (9)..(9): 5-methyl modified nucleotide
  modified_base (13)..(13): 5-methyl modified nucleotide
  modified_base (14)..(14): 5-methyl modified nucleotide
  modified_base (15)..(15): 5-methyl bicyclic nucleic acid
  modified_base (16)..(16): bicyclic nucleic acid (BNA)
guucuguccaagcccg

SEQ ID NO: 19460 - RNA, 15 nt, Artificial Sequence
  source: /note="Description of Artificial Sequence: Synthetic oligonucleotide"
  source: /note="RNA"
  source: /note="5' tri-ethylene glycol (TEG)"
  modified_base (4)..(4): 5-methyl modified nucleotide
  modified_base (8)..(8): 5-methyl modified nucleotide
  modified_base (9)..(9): 5-methyl modified nucleotide
  modified_base (13)..(13): 5-methyl modified nucleotide
  modified_base (14)..(14): 5-methyl bicyclic nucleic acid
  modified_base (15)..(15): 5-methyl bicyclic nucleic acid
guucuguccaagccc

SEQ ID NO: 19461 - RNA, 14 nt, Artificial Sequence
  source: /note="Description of Artificial Sequence: Synthetic oligonucleotide"
  source: /note="RNA"
  source: /note="5' tri-ethylene glycol (TEG)"
  modified_base (4)..(4): 5-methyl modified nucleotide
  modified_base (8)..(8): 5-methyl modified nucleotide
  modified_base (9)..(9): 5-methyl modified nucleotide
  modified_base (13)..(13): 5-methyl bicyclic nucleic acid
  modified_base (14)..(14): 5-methyl bicyclic nucleic acid
guucuguccaagcc

SEQ ID NO: 19462 - RNA, 13 nt, Artificial Sequence
  source: /note="Description of Artificial Sequence: Synthetic oligonucleotide"
  source: /note="RNA"
  source: /note="5' tri-ethylene glycol (TEG)"
  modified_base (4)..(4): 5-methyl modified nucleotide
  modified_base (8)..(8): 5-methyl modified nucleotide
  modified_base (9)..(9): 5-methyl modified nucleotide
  modified_base (12)..(12): bicyclic nucleic acid (BNA)
  modified_base (13)..(13): 5-methyl bicyclic nucleic acid
guucuguccaagc

SEQ ID NO: 19463 - RNA, 12 nt, Artificial Sequence
  source: /note="Description of Artificial Sequence: Synthetic oligonucleotide"
  source: /note="RNA"
  source: /note="5' tri-ethylene glycol (TEG)"
  modified_base (4)..(4): 5-methyl modified nucleotide
  modified_base (8)..(8): 5-methyl modified nucleotide
  modified_base (9)..(9): 5-methyl modified nucleotide
  modified_base (11)..(11): bicyclic nucleic acid (BNA)
  modified_base (12)..(12): bicyclic nucleic acid (BNA)
guucuguccaag

SEQ ID NO: 19464 - RNA, 11 nt, Artificial Sequence
  source: /note="Description of Artificial Sequence: Synthetic oligonucleotide"
  source: /note="RNA"
  source: /note="5' tri-ethylene glycol (TEG)"
  modified_base (4)..(4): 5-methyl modified nucleotide
  modified_base (8)..(8): 5-methyl modified nucleotide
  modified_base (9)..(9): 5-methyl modified nucleotide
  modified_base (10)..(10): bicyclic nucleic acid (BNA)
  modified_base (11)..(11): bicyclic nucleic acid (BNA)
guucuguccaa

SEQ ID NO: 19465 - RNA, 10 nt, Artificial Sequence
  source: /note="Description of Artificial Sequence: Synthetic oligonucleotide"
  source: /note="RNA"
  source: /note="5' tri-ethylene glycol (TEG)"
  modified_base (4)..(4): 5-methyl modified nucleotide
  modified_base (8)..(8): 5-methyl modified nucleotide
  modified_base (9)..(9): 5-methyl bicyclic nucleic acid
  modified_base (10)..(10): bicyclic nucleic acid (BNA)
guucugucca

SEQ ID NO: 19466 - RNA, 9 nt, Artificial Sequence
  source: /note="Description of Artificial Sequence: Synthetic oligonucleotide"
  source: /note="RNA"
  source: /note="5' tri-ethylene glycol (TEG)"
  modified_base (4)..(4): 5-methyl modified nucleotide
  modified_base (8)..(8): 5-methyl bicyclic nucleic acid
  modified_base (9)..(9): 5-methyl bicyclic nucleic acid
guucugucc

SEQ ID NO: 19467 - DNA, 8 bp, Artificial Sequence
  source: /note="Description of Artificial Sequence: Synthetic oligonucleotide"
  source: /note="Description of Combined DNA/RNA Molecule: Synthetic oligonucleotide"
  source: /note="DNA/RNA"
  source: /note="5' tri-ethylene glycol (TEG)"
  modified_base (4)..(4): 5-methyl modified nucleotide
  modified_base (7)..(7): bicyclic nucleic acid (BNA)
  modified_base (8)..(8): 5-methyl bicyclic nucleic acid
guucugtc

SEQ ID NO: 19468 - DNA, 20 bp, Artificial Sequence
  source: /note="Description of Artificial Sequence: Synthetic oligonucleotide"
  source: /note="Description of Combined DNA/RNA Molecule: Synthetic oligonucleotide"
  source: /note="DNA/RNA"
  source: /note="5' tri-ethylene glycol (TEG)"
  modified_base (5)..(5): 5-methyl modified nucleotide
  modified_base (9)..(9): 5-methyl modified nucleotide
  modified_base (10)..(10): 5-methyl modified nucleotide
  modified_base (14)..(14): 5-methyl modified nucleotide
  modified_base (15)..(15): 5-methyl modified nucleotide
  modified_base (16)..(16): 5-methyl modified nucleotide
  modified_base (19)..(19): bicyclic nucleic acid (BNA)
  modified_base (20)..(20): bicyclic nucleic acid (BNA)
aguucuguccaagcccggtt

SEQ ID NO: 19469 - DNA, 19 bp, Artificial Sequence
  source: /note="Description of Artificial Sequence: Synthetic oligonucleotide"
  source: /note="Description of Combined DNA/RNA Molecule: Synthetic oligonucleotide"
  source: /note="DNA/RNA"
  source: /note="5' tri-ethylene glycol (TEG)"
  modified_base (5)..(5): 5-methyl modified nucleotide
  modified_base (9)..(9): 5-methyl modified nucleotide
  modified_base (10)..(10): 5-methyl modified nucleotide
  modified_base (14)..(14): 5-methyl modified nucleotide
  modified_base (15)..(15): 5-methyl modified nucleotide
  modified_base (16)..(16): 5-methyl modified nucleotide
  modified_base (18)..(18): bicyclic nucleic acid (BNA)
  modified_base (19)..(19): bicyclic nucleic acid (BNA)
aguucuguccaagcccggt

SEQ ID NO: 19470 - RNA, 18 nt, Artificial Sequence
  source: /note="Description of Artificial Sequence: Synthetic oligonucleotide"
  source: /note="RNA"
  source: /note="5' tri-ethylene glycol (TEG)"
  modified_base (5)..(5): 5-methyl modified nucleotide
  modified_base (9)..(9): 5-methyl modified nucleotide
  modified_base (10)..(10): 5-methyl modified nucleotide
  modified_base (14)..(14): 5-methyl modified nucleotide
  modified_base (15)..(15): 5-methyl modified nucleotide
  modified_base (16)..(16): 5-methyl modified nucleotide
  modified_base (17)..(17): bicyclic nucleic acid (BNA)
  modified_base (18)..(18): bicyclic nucleic acid (BNA)
aguucuguccaagcccgg

SEQ ID NO: 19471 - RNA, 17 nt, Artificial Sequence
  source: /note="Description of Artificial Sequence: Synthetic oligonucleotide"
  source: /note="RNA"
  source: /note="5' tri-ethylene glycol (TEG)"
  modified_base (5)..(5): 5-methyl modified nucleotide
  modified_base (9)..(9): 5-methyl modified nucleotide
  modified_base (10)..(10): 5-methyl modified nucleotide
  modified_base (14)..(14): 5-methyl modified nucleotide
  modified_base (15)..(15): 5-methyl modified nucleotide
  modified_base (16)..(16): 5-methyl bicyclic nucleic acid
  modified_base (17)..(17): bicyclic nucleic acid (BNA)
aguucuguccaagcccg

SEQ ID NO: 19472 - RNA, 16 nt, Artificial Sequence
  source: /note="Description of Artificial Sequence: Synthetic oligonucleotide"
  source: /note="RNA"
  source: /note="5' tri-ethylene glycol (TEG)"
  modified_base (5)..(5): 5-methyl modified nucleotide
  modified_base (9)..(9): 5-methyl modified nucleotide
  modified_base (10)..(10): 5-methyl modified nucleotide
  modified_base (14)..(14): 5-methyl modified nucleotide
  modified_base (15)..(15): 5-methyl bicyclic nucleic acid
  modified_base (16)..(16): 5-methyl bicyclic nucleic acid
aguucuguccaagccc

SEQ ID NO: 19473 - RNA, 15 nt, Artificial Sequence
  source: /note="Description of Artificial Sequence: Synthetic oligonucleotide"
  source: /note="RNA"
  source: /note="5' tri-ethylene glycol (TEG)"
  modified_base (5)..(5): 5-methyl modified nucleotide
  modified_base (9)..(9): 5-methyl modified nucleotide
  modified_base (10)..(10): 5-methyl modified nucleotide
  modified_base (14)..(14): 5-methyl bicyclic nucleic acid
  modified_base (15)..(15): 5-methyl bicyclic nucleic acid
aguucuguccaagcc

SEQ ID NO: 19474 - RNA, 14 nt, Artificial Sequence
  source: /note="Description of Artificial Sequence: Synthetic oligonucleotide"
  source: /note="RNA"
  source: /note="5' tri-ethylene glycol (TEG)"
  modified_base (5)..(5): 5-methyl modified nucleotide
  modified_base (9)..(9): 5-methyl modified nucleotide
  modified_base (10)..(10): 5-methyl modified nucleotide
  modified_base (13)..(13): bicyclic nucleic acid (BNA)
  modified_base (14)..(14): 5-methyl bicyclic nucleic acid
aguucuguccaagc

SEQ ID NO: 19475 - RNA, 13 nt, Artificial Sequence
  source: /note="Description of Artificial Sequence: Synthetic oligonucleotide"
  source: /note="RNA"
  source: /note="5' tri-ethylene glycol (TEG)"
  modified_base (5)..(5): 5-methyl modified nucleotide
  modified_base (9)..(9): 5-methyl modified nucleotide
  modified_base (10)..(10): 5-methyl modified nucleotide
  modified_base (12)..(12): bicyclic nucleic acid (BNA)
  modified_base (13)..(13): bicyclic nucleic acid (BNA)
aguucuguccaag

SEQ ID NO: 19476 - RNA, 12 nt, Artificial Sequence
  source: /note="Description of Artificial Sequence: Synthetic oligonucleotide"
  source: /note="RNA"
  source: /note="5' tri-ethylene glycol (TEG)"
  modified_base (5)..(5): 5-methyl modified nucleotide
  modified_base (9)..(9): 5-methyl modified nucleotide
  modified_base (10)..(10): 5-methyl modified nucleotide
  modified_base (11)..(11): bicyclic nucleic acid (BNA)
  modified_base (12)..(12): bicyclic nucleic acid (BNA)
aguucuguccaa

SEQ ID NO: 19477 - RNA, 11 nt, Artificial Sequence
  source: /note="Description of Artificial Sequence: Synthetic oligonucleotide"
  source: /note="RNA"
  source: /note="5' tri-ethylene glycol (TEG)"
  modified_base (5)..(5): 5-methyl modified nucleotide
  modified_base (9)..(9): 5-methyl modified nucleotide
  modified_base (10)..(10): 5-methyl bicyclic nucleic acid
  modified_base (11)..(11): bicyclic nucleic acid (BNA)
aguucugucca

SEQ ID NO: 19478 - RNA, 10 nt, Artificial Sequence
  source: /note="Description of Artificial Sequence: Synthetic oligonucleotide"
  source: /note="RNA"
  source: /note="5' tri-ethylene glycol (TEG)"
  modified_base (5)..(5): 5-methyl modified nucleotide
  modified_base (9)..(9): 5-methyl bicyclic nucleic acid
  modified_base (10)..(10): 5-methyl bicyclic nucleic acid
aguucugucc

SEQ ID NO: 19479 - DNA, 9 bp, Artificial Sequence
  source: /note="Description of Artificial Sequence: Synthetic oligonucleotide"
  source: /note="Description of Combined DNA/RNA Molecule: Synthetic oligonucleotide"
  source: /note="DNA/RNA"
  source: /note="5' tri-ethylene glycol (TEG)"
  modified_base (5)..(5): 5-methyl modified nucleotide
  modified_base (8)..(8): bicyclic nucleic acid (BNA)
  modified_base (9)..(9): 5-methyl bicyclic nucleic acid
aguucugtc

SEQ ID NO: 19480 - DNA, 8 bp, Artificial Sequence
  source: /note="Description of Artificial Sequence: Synthetic oligonucleotide"
  source: /note="Description of Combined DNA/RNA Molecule: Synthetic oligonucleotide"
  source: /note="DNA/RNA"
  source: /note="5' tri-ethylene glycol (TEG)"
  modified_base (5)..(5): 5-methyl modified nucleotide
  modified_base (7)..(7): bicyclic nucleic acid (BNA)
  modified_base (8)..(8): bicyclic nucleic acid (BNA)
aguucugt

SEQ ID NO: 19481 - DNA, 20 bp, Artificial Sequence
  source: /note="Description of Artificial Sequence: Synthetic oligonucleotide"
  source: /note="Description of Combined DNA/RNA Molecule: Synthetic oligonucleotide"
  source: /note="DNA/RNA"
  source: /note="5' tri-ethylene glycol (TEG)"
  modified_base (6)..(6): 5-methyl modified nucleotide
  modified_base (10)..(10): 5-methyl modified nucleotide
  modified_base (11)..(11): 5-methyl modified nucleotide
  modified_base (15)..(15): 5-methyl modified nucleotide
  modified_base (16)..(16): 5-methyl modified nucleotide
  modified_base (17)..(17): 5-methyl modified nucleotide
  modified_base (19)..(19): bicyclic nucleic acid (BNA)
  modified_base (20)..(20): bicyclic nucleic acid (BNA)
aaguucuguccaagcccggt

SEQ ID NO: 19482 - RNA, 19 nt, Artificial Sequence
  source: /note="Description of Artificial Sequence: Synthetic oligonucleotide"
  source: /note="RNA"
  source: /note="5' tri-ethylene glycol (TEG)"
  modified_base (6)..(6): 5-methyl modified nucleotide
  modified_base (10)..(10): 5-methyl modified nucleotide
  modified_base (11)..(11): 5-methyl modified nucleotide
  modified_base (15)..(15): 5-methyl modified nucleotide
  modified_base (16)..(16): 5-methyl modified nucleotide
  modified_base (17)..(17): 5-methyl modified nucleotide
  modified_base (18)..(18): bicyclic nucleic acid (BNA)
  modified_base (19)..(19): bicyclic nucleic acid (BNA)
aaguucuguccaagcccgg

SEQ ID NO: 19483 - RNA, 18 nt, Artificial Sequence
  source: /note="Description of Artificial Sequence: Synthetic oligonucleotide"
  source: /note="RNA"
  source: /note="5' tri-ethylene glycol (TEG)"
  modified_base (6)..(6): 5-methyl modified nucleotide
  modified_base (10)..(10): 5-methyl modified nucleotide
  modified_base (11)..(11): 5-methyl modified nucleotide
  modified_base (15)..(15): 5-methyl modified nucleotide
  modified_base (16)..(16): 5-methyl modified nucleotide
  modified_base (17)..(17): 5-methyl bicyclic nucleic acid
  modified_base (18)..(18): bicyclic nucleic acid (BNA)
aaguucuguccaagcccg

SEQ ID NO: 19484 - RNA, 17 nt, Artificial Sequence
  source: /note="Description of Artificial Sequence: Synthetic oligonucleotide"
  source: /note="RNA"
  source: /note="5' tri-ethylene glycol (TEG)"
  modified_base (6)..(6): 5-methyl modified nucleotide
  modified_base (10)..(10): 5-methyl modified nucleotide
  modified_base (11)..(11): 5-methyl modified nucleotide
  modified_base (15)..(15): 5-methyl modified nucleotide
  modified_base (16)..(16): 5-methyl bicyclic nucleic acid
  modified_base (17)..(17): 5-methyl bicyclic nucleic acid
aaguucuguccaagccc

SEQ ID NO: 19485 - RNA, 16 nt, Artificial Sequence
  source: /note="Description of Artificial Sequence: Synthetic oligonucleotide"
  source: /note="RNA"
  source: /note="5' tri-ethylene glycol (TEG)"
  modified_base (6)..(6): 5-methyl modified nucleotide
  modified_base (10)..(10): 5-methyl modified nucleotide
  modified_base (11)..(11): 5-methyl modified nucleotide
  modified_base (15)..(15): 5-methyl bicyclic nucleic acid
  modified_base (16)..(16): 5-methyl bicyclic nucleic acid
aaguucuguccaagcc

SEQ ID NO: 19486 - RNA, 15 nt, Artificial Sequence
  source: /note="Description of Artificial Sequence: Synthetic oligonucleotide"
  source: /note="RNA"
  source: /note="5' tri-ethylene glycol (TEG)"
  modified_base (6)..(6): 5-methyl modified nucleotide
  modified_base (10)..(10): 5-methyl modified nucleotide
  modified_base (11)..(11): 5-methyl modified nucleotide
  modified_base (14)..(14): bicyclic nucleic acid (BNA)
  modified_base (15)..(15): 5-methyl bicyclic nucleic acid
aaguucuguccaagc

SEQ ID NO: 19487 - RNA, 14 nt, Artificial Sequence
  source: /note="Description of Artificial Sequence: Synthetic oligonucleotide"
  source: /note="RNA"
  source: /note="5' tri-ethylene glycol (TEG)"
  modified_base (6)..(6): 5-methyl modified nucleotide
  modified_base (10)..(10): 5-methyl modified nucleotide
  modified_base (11)..(11): 5-methyl modified nucleotide
  modified_base (13)..(13): bicyclic nucleic acid (BNA)
  modified_base (14)..(14): bicyclic nucleic acid (BNA)
aaguucuguccaag

SEQ ID NO: 19488 - RNA, 13 nt, Artificial Sequence
  source: /note="Description of Artificial Sequence: Synthetic oligonucleotide"
  source: /note="RNA"
  source: /note="5' tri-ethylene glycol (TEG)"
  modified_base (6)..(6): 5-methyl modified nucleotide
  modified_base (10)..(10): 5-methyl modified nucleotide
  modified_base (11)..(11): 5-methyl modified nucleotide
  modified_base (12)..(12): bicyclic nucleic acid (BNA)
  modified_base (13)..(13): bicyclic nucleic acid (BNA)
aaguucuguccaa

SEQ ID NO: 19489 - RNA, 12 nt, Artificial Sequence
  source: /note="Description of Artificial Sequence: Synthetic oligonucleotide"
  source: /note="RNA"
  source: /note="5' tri-ethylene glycol (TEG)"
  modified_base (6)..(6): 5-methyl modified nucleotide
  modified_base (10)..(10): 5-methyl modified nucleotide
  modified_base (11)..(11): 5-methyl bicyclic nucleic acid
  modified_base (12)..(12): bicyclic nucleic acid (BNA)
aaguucugucca

SEQ ID NO: 19490 - RNA, 11 nt, Artificial Sequence
  source: /note="Description of Artificial Sequence: Synthetic oligonucleotide"
  source: /note="RNA"
  source: /note="5' tri-ethylene glycol (TEG)"
  modified_base (6)..(6): 5-methyl modified nucleotide
  modified_base (10)..(10): 5-methyl bicyclic nucleic acid
  modified_base (11)..(11): 5-methyl bicyclic nucleic acid
aaguucugucc

SEQ ID NO: 19491 - DNA, 10 bp, Artificial Sequence
  source: /note="Description of Artificial Sequence: Synthetic oligonucleotide"
  source: /note="Description of Combined DNA/RNA Molecule: Synthetic oligonucleotide"
  source: /note="DNA/RNA"
  source: /note="5' tri-ethylene glycol (TEG)"
  modified_base (6)..(6): 5-methyl modified nucleotide
  modified_base (9)..(9): bicyclic nucleic acid (BNA)
  modified_base (10)..(10): 5-methyl bicyclic nucleic acid
aaguucugtc

SEQ ID NO: 19492 - DNA, 9 bp, Artificial Sequence
  source: /note="Description of Artificial Sequence: Synthetic oligonucleotide"
  source: /note="Description of Combined DNA/RNA Molecule: Synthetic oligonucleotide"
  source: /note="DNA/RNA"
  source: /note="5' tri-ethylene glycol (TEG)"
  modified_base (6)..(6): 5-methyl modified nucleotide
  modified_base (8)..(8): bicyclic nucleic acid (BNA)
  modified_base (9)..(9): bicyclic nucleic acid (BNA)
aaguucugt

SEQ ID NO: 19493 - DNA, 8 bp, Artificial Sequence
  source: /note="Description of Artificial Sequence: Synthetic oligonucleotide"
  source: /note="Description of Combined DNA/RNA Molecule: Synthetic oligonucleotide"
  source: /note="DNA/RNA"
  source: /note="5' tri-ethylene glycol (TEG)"
  modified_base (6)..(6): 5-methyl modified nucleotide
  modified_base (7)..(7): bicyclic nucleic acid (BNA)
  modified_base (8)..(8): bicyclic nucleic acid (BNA)
aaguuctg

SEQ ID NO: 19494 - RNA, 20 nt, Artificial Sequence
  source: /note="Description of Artificial Sequence: Synthetic oligonucleotide"
  source: /note="RNA"
  source: /note="5' tri-ethylene glycol (TEG)"
  modified_base (7)..(7): 5-methyl modified nucleotide
  modified_base (11)..(11): 5-methyl modified nucleotide
  modified_base (12)..(12): 5-methyl modified nucleotide
  modified_base (16)..(16): 5-methyl modified nucleotide
  modified_base (17)..(17): 5-methyl modified nucleotide
  modified_base (18)..(18): 5-methyl modified nucleotide
  modified_base (19)..(19): bicyclic nucleic acid (BNA)
  modified_base (20)..(20): bicyclic nucleic acid (BNA)
uaaguucuguccaagcccgg

SEQ ID NO: 19495 - RNA, 19 nt, Artificial Sequence
  source: /note="Description of Artificial Sequence: Synthetic oligonucleotide"
  source: /note="RNA"
  source: /note="5' tri-ethylene glycol (TEG)"
  modified_base (7)..(7): 5-methyl modified nucleotide
  modified_base (11)..(11): 5-methyl modified nucleotide
  modified_base (12)..(12): 5-methyl modified nucleotide
  modified_base (16)..(16): 5-methyl modified nucleotide
  modified_base (17)..(17): 5-methyl modified nucleotide
  modified_base (18)..(18): 5-methyl bicyclic nucleic acid
  modified_base (19)..(19): bicyclic nucleic acid (BNA)
uaaguucuguccaagcccg

SEQ ID NO: 19496 - RNA, 18 nt, Artificial Sequence
  source: /note="Description of Artificial Sequence: Synthetic oligonucleotide"
  source: /note="RNA"
  source: /note="5' tri-ethylene glycol (TEG)"
  modified_base (7)..(7): 5-methyl modified nucleotide
  modified_base (11)..(11): 5-methyl modified nucleotide
  modified_base (12)..(12): 5-methyl modified nucleotide
  modified_base (16)..(16): 5-methyl modified nucleotide
  modified_base (17)..(17): 5-methyl bicyclic nucleic acid
  modified_base (18)..(18): 5-methyl bicyclic nucleic acid
uaaguucuguccaagccc

SEQ ID NO: 19497 - RNA, 17 nt, Artificial Sequence
  source: /note="Description of Artificial Sequence: Synthetic oligonucleotide"
  source: /note="RNA"
  source: /note="5' tri-ethylene glycol (TEG)"
  modified_base (7)..(7): 5-methyl modified nucleotide
  modified_base (11)..(11): 5-methyl modified nucleotide
  modified_base (12)..(12): 5-methyl modified nucleotide
  modified_base (16)..(16): 5-methyl bicyclic nucleic acid
  modified_base (17)..(17): 5-methyl bicyclic nucleic acid
uaaguucuguccaagcc

SEQ ID NO: 19498 - RNA, 16 nt, Artificial Sequence
  source: /note="Description of Artificial Sequence: Synthetic oligonucleotide"
  source: /note="RNA"
  source: /note="5' tri-ethylene glycol (TEG)"
  modified_base (7)..(7): 5-methyl modified nucleotide
  modified_base (11)..(11): 5-methyl modified nucleotide
  modified_base (12)..(12): 5-methyl modified nucleotide
  modified_base (15)..(15): bicyclic nucleic acid (BNA)
  modified_base (16)..(16): 5-methyl bicyclic nucleic acid
uaaguucuguccaagc

SEQ ID NO: 19499 - RNA, 14 nt, Artificial Sequence
  source: /note="Description of Artificial Sequence: Synthetic oligonucleotide"
  source: /note="RNA"
  source: /note="5' tri-ethylene glycol (TEG)"
  modified_base (7)..(7): 5-methyl modified nucleotide
  modified_base (11)..(11): 5-methyl modified nucleotide
  modified_base (12)..(12): 5-methyl modified nucleotide
  modified_base (13)..(13): bicyclic nucleic acid (BNA)
  modified_base (14)..(14): bicyclic nucleic acid (BNA)
uaaguucuguccaa

SEQ ID NO: 19500 - RNA, 13 nt, Artificial Sequence
  source: /note="Description of Artificial Sequence: Synthetic oligonucleotide"
  source: /note="RNA"
  source: /note="5' tri-ethylene glycol (TEG)"
  modified_base (7)..(7): 5-methyl modified nucleotide
  modified_base (11)..(11): 5-methyl modified nucleotide
  modified_base (12)..(12): 5-methyl bicyclic nucleic acid
  modified_base (13)..(13): bicyclic nucleic acid (BNA)
uaaguucugucca

SEQ ID NO: 19501 - RNA, 12 nt, Artificial Sequence
  source: /note="Description of Artificial Sequence: Synthetic oligonucleotide"
  source: /note="RNA"
  source: /note="5' tri-ethylene glycol (TEG)"
  modified_base (7)..(7): 5-methyl modified nucleotide
  modified_base (11)..(11): 5-methyl bicyclic nucleic acid
  modified_base (12)..(12): 5-methyl bicyclic nucleic acid
uaaguucugucc

SEQ ID NO: 19502 - DNA, 11 bp, Artificial Sequence
  source: /note="Description of Artificial Sequence: Synthetic oligonucleotide"
  source: /note="Description of Combined DNA/RNA Molecule: Synthetic oligonucleotide"
  source: /note="DNA/RNA"
  source: /note="5' tri-ethylene glycol (TEG)"
  modified_base (7)..(7): 5-methyl modified nucleotide
  modified_base (10)..(10): bicyclic nucleic acid (BNA)
  modified_base (11)..(11): 5-methyl bicyclic nucleic acid
uaaguucugtc

SEQ ID NO: 19503 - DNA, 10 bp, Artificial Sequence
  source: /note="Description of Artificial Sequence: Synthetic oligonucleotide"
  source: /note="Description of Combined DNA/RNA Molecule: Synthetic oligonucleotide"
  source: /note="DNA/RNA"
  source: /note="5' tri-ethylene glycol (TEG)"
  modified_base (7)..(7): 5-methyl modified nucleotide
  modified_base (9)..(9): bicyclic nucleic acid (BNA)
  modified_base (10)..(10): bicyclic nucleic acid (BNA)
uaaguucugt

SEQ ID NO: 19504 - DNA, 9 bp, Artificial Sequence
  source: /note="Description of Artificial Sequence: Synthetic oligonucleotide"
  source: /note="Description of Combined DNA/RNA Molecule: Synthetic oligonucleotide"
  source: /note="DNA/RNA"
  source: /note="5' tri-ethylene glycol (TEG)"
  modified_base (7)..(7): 5-methyl modified nucleotide
  modified_base (8)..(8): bicyclic nucleic acid (BNA)
  modified_base (9)..(9): bicyclic nucleic acid (BNA)
uaaguuctg

SEQ ID NO: 19505 - DNA, 8 bp, Artificial Sequence
  source: /note="Description of Artificial Sequence: Synthetic oligonucleotide"
  source: /note="Description of Combined DNA/RNA Molecule: Synthetic oligonucleotide"
  source: /note="DNA/RNA"
  source: /note="5' tri-ethylene glycol (TEG)"
  modified_base (7)..(7): 5-methyl bicyclic nucleic acid
  modified_base (8)..(8): bicyclic nucleic acid (BNA)
uaaguuct

SEQ ID NO: 19506 - RNA, 20 nt, Artificial Sequence
  source: /note="Description of Artificial Sequence: Synthetic oligonucleotide"
  source: /note="RNA"
  source: /note="5' tri-ethylene glycol (TEG)"
  modified_base (8)..(8): 5-methyl modified nucleotide
  modified_base (12)..(12): 5-methyl modified nucleotide
  modified_base (13)..(13): 5-methyl modified nucleotide
  modified_base (17)..(17): 5-methyl modified nucleotide
  modified_base (18)..(18): 5-methyl modified nucleotide
  modified_base (19)..(19): 5-methyl bicyclic nucleic acid
  modified_base (20)..(20): bicyclic nucleic acid (BNA)
guaaguucuguccaagcccg

SEQ ID NO: 19507 - RNA, 19 nt, Artificial Sequence
  source: /note="Description of Artificial Sequence: Synthetic oligonucleotide"
  source: /note="RNA"
  source: /note="5' tri-ethylene glycol (TEG)"
  modified_base (8)..(8): 5-methyl modified nucleotide
  modified_base (12)..(12): 5-methyl modified nucleotide
  modified_base (13)..(13): 5-methyl modified nucleotide
  modified_base (17)..(17): 5-methyl modified nucleotide
  modified_base (18)..(18): 5-methyl bicyclic nucleic acid
  modified_base (19)..(19): 5-methyl bicyclic nucleic acid
guaaguucuguccaagccc

SEQ ID NO: 19508 - RNA, 17 nt, Artificial Sequence
  source: /note="Description of Artificial Sequence: Synthetic oligonucleotide"
  source: /note="RNA"
  source: /note="5' tri-ethylene glycol (TEG)"
  modified_base (8)..(8): 5-methyl modified nucleotide
  modified_base (12)..(12): 5-methyl modified nucleotide
  modified_base (13)..(13): 5-methyl modified nucleotide
  modified_base (16)..(16): bicyclic nucleic acid (BNA)
  modified_base (17)..(17): 5-methyl bicyclic nucleic acid
guaaguucuguccaagc

SEQ ID NO: 19509 - RNA, 16 nt, Artificial Sequence
  source: /note="Description of Artificial Sequence: Synthetic oligonucleotide"
  source: /note="RNA"
  source: /note="5' tri-ethylene glycol (TEG)"
  modified_base (8)..(8): 5-methyl modified nucleotide
  modified_base (12)..(12): 5-methyl modified nucleotide
  modified_base (13)..(13): 5-methyl modified nucleotide
  modified_base (15)..(15): bicyclic nucleic acid (BNA)
  modified_base (16)..(16): bicyclic nucleic acid (BNA)
guaaguucuguccaag

SEQ ID NO: 19510 - RNA, 15 nt, Artificial Sequence
  source: /note="Description of Artificial Sequence: Synthetic oligonucleotide"
  source: /note="RNA"
  source: /note="5' tri-ethylene glycol (TEG)"
  modified_base (8)..(8): 5-methyl modified nucleotide
  modified_base (12)..(12): 5-methyl modified nucleotide
  modified_base (13)..(13): 5-methyl modified nucleotide
  modified_base (14)..(14): bicyclic nucleic acid (BNA)
  modified_base (15)..(15): bicyclic nucleic acid (BNA)
guaaguucuguccaa

SEQ ID NO: 19511 - RNA, 14 nt, Artificial Sequence
  source: /note="Description of Artificial Sequence: Synthetic oligonucleotide"
  source: /note="RNA"
  source: /note="5' tri-ethylene glycol (TEG)"
  modified_base (8)..(8): 5-methyl modified nucleotide
  modified_base (12)..(12): 5-methyl modified nucleotide
  modified_base (13)..(13): 5-methyl bicyclic nucleic acid
  modified_base (14)..(14): bicyclic nucleic acid (BNA)
guaaguucugucca

SEQ ID NO: 19512 - RNA, 13 nt, Artificial Sequence
  source: /note="Description of Artificial Sequence: Synthetic oligonucleotide"
  source: /note="RNA"
  source: /note="5' tri-ethylene glycol (TEG)"
  modified_base (8)..(8): 5-methyl modified nucleotide
  modified_base (12)..(12): 5-methyl bicyclic nucleic acid
  modified_base (13)..(13): 5-methyl bicyclic nucleic acid
guaaguucugucc

SEQ ID NO: 19513 - DNA, 12 bp, Artificial Sequence
  source: /note="Description of Artificial Sequence: Synthetic oligonucleotide"
  source: /note="Description of Combined DNA/RNA Molecule: Synthetic oligonucleotide"
  source: /note="DNA/RNA"
  source: /note="5' tri-ethylene glycol (TEG)"
  modified_base (8)..(8): 5-methyl modified nucleotide
  modified_base (11)..(11): bicyclic nucleic acid (BNA)
  modified_base (12)..(12): 5-methyl bicyclic nucleic acid
guaaguucugtc

SEQ ID NO: 19514 - DNA, 11 bp, Artificial Sequence
  source: /note="Description of Artificial Sequence: Synthetic oligonucleotide"
  source: /note="Description of Combined DNA/RNA Molecule: Synthetic oligonucleotide"
  source: /note="DNA/RNA"
  source: /note="5' tri-ethylene glycol (TEG)"
  modified_base (8)..(8): 5-methyl modified nucleotide
  modified_base (10)..(10): bicyclic nucleic acid (BNA)
  modified_base (11)..(11): bicyclic nucleic acid (BNA)
guaaguucugt

SEQ ID NO: 19515 - DNA, 10 bp, Artificial Sequence
  source: /note="Description of Artificial Sequence: Synthetic oligonucleotide"
  source: /note="Description of Combined DNA/RNA Molecule: Synthetic oligonucleotide"
  source: /note="DNA/RNA"
  source: /note="5' tri-ethylene glycol (TEG)"
  modified_base (8)..(8): 5-methyl modified nucleotide
  modified_base (9)..(9): bicyclic nucleic acid (BNA)
  modified_base (10)..(10): bicyclic nucleic acid (BNA)
guaaguuctg

SEQ ID NO: 19516 - DNA, 9 bp, Artificial Sequence
  source: /note="Description of Artificial Sequence: Synthetic oligonucleotide"
  source: /note="Description of Combined DNA/RNA Molecule: Synthetic oligonucleotide"
  source: /note="DNA/RNA"
  source: /note="5' tri-ethylene glycol (TEG)"
  modified_base (8)..(8): 5-methyl bicyclic nucleic acid
  modified_base (9)..(9): bicyclic nucleic acid (BNA)
guaaguuct

SEQ ID NO: 19517 - DNA, 8 bp, Artificial Sequence
  source: /note="Description of Artificial Sequence: Synthetic oligonucleotide"
  source: /note="Description of Combined DNA/RNA Molecule: Synthetic oligonucleotide"
  source: /note="DNA/RNA"
  source: /note="5' tri-ethylene glycol (TEG)"
  modified_base (7)..(7): bicyclic nucleic acid (BNA)
  modified_base (8)..(8): 5-methyl bicyclic nucleic acid
guaagutc

SEQ ID NO: 19518 - RNA, 20 nt, Artificial Sequence
  source: /note="Description of Artificial Sequence: Synthetic oligonucleotide"
  source: /note="RNA"
  source: /note="5' tri-ethylene glycol (TEG)"
  modified_base (9)..(9): 5-methyl modified nucleotide
  modified_base (13)..(13): 5-methyl modified nucleotide
  modified_base (14)..(14): 5-methyl modified nucleotide
  modified_base (18)..(18): 5-methyl modified nucleotide
  modified_base (19)..(19): 5-methyl bicyclic nucleic acid
  modified_base (20)..(20): 5-methyl bicyclic nucleic acid
gguaaguucuguccaagccc

SEQ ID NO: 19519 - RNA, 19 nt, Artificial Sequence
  source: /note="Description of Artificial Sequence: Synthetic oligonucleotide"
  source: /note="RNA"
  source: /note="5' tri-ethylene glycol (TEG)"
  modified_base (9)..(9): 5-methyl modified nucleotide
  modified_base (13)..(13): 5-methyl modified nucleotide
  modified_base (14)..(14): 5-methyl modified nucleotide
  modified_base (18)..(18): 5-methyl bicyclic nucleic acid
  modified_base (19)..(19): 5-methyl bicyclic nucleic acid
gguaaguucuguccaagcc

SEQ ID NO: 19520 - RNA, 17 nt, Artificial Sequence
  source: /note="Description of Artificial Sequence: Synthetic oligonucleotide"
  source: /note="RNA"
  source: /note="5' tri-ethylene glycol (TEG)"
  modified_base (9)..(9): 5-methyl modified nucleotide
  modified_base (13)..(13): 5-methyl modified nucleotide
  modified_base (14)..(14): 5-methyl modified nucleotide
  modified_base (16)..(16): bicyclic nucleic acid (BNA)
  modified_base (17)..(17): bicyclic nucleic acid (BNA)
gguaaguucuguccaag

SEQ ID NO: 19521 - RNA, 16 nt, Artificial Sequence
  source: /note="Description of Artificial Sequence: Synthetic oligonucleotide"
  source: /note="RNA"
  source: /note="5' tri-ethylene glycol (TEG)"
  modified_base (9)..(9): 5-methyl modified nucleotide
  modified_base (13)..(13): 5-methyl modified nucleotide
  modified_base (14)..(14): 5-methyl modified nucleotide
  modified_base (15)..(15): bicyclic nucleic acid (BNA)
  modified_base (16)..(16): bicyclic nucleic acid (BNA)
gguaaguucuguccaa

SEQ ID NO: 19522 - RNA, 15 nt, Artificial Sequence
  source: /note="Description of Artificial Sequence: Synthetic oligonucleotide"
  source: /note="RNA"
  source: /note="5' tri-ethylene glycol (TEG)"
  modified_base (9)..(9): 5-methyl modified nucleotide
  modified_base (13)..(13): 5-methyl modified nucleotide
  modified_base (14)..(14): 5-methyl bicyclic nucleic acid
  modified_base (15)..(15): bicyclic nucleic acid (BNA)
gguaaguucugucca

SEQ ID NO: 19523 - RNA, 14 nt, Artificial Sequence
  source: /note="Description of Artificial Sequence: Synthetic oligonucleotide"
  source: /note="RNA"
  source: /note="5' tri-ethylene glycol (TEG)"
  modified_base (9)..(9): 5-methyl modified nucleotide
  modified_base (13)..(13): 5-methyl bicyclic nucleic acid
  modified_base (14)..(14): 5-methyl bicyclic nucleic acid
gguaaguucugucc

SEQ ID NO: 19524 - DNA, 13 bp, Artificial Sequence
  source: /note="Description of Artificial Sequence: Synthetic oligonucleotide"
  source: /note="Description of Combined DNA/RNA Molecule: Synthetic oligonucleotide"
  source: /note="DNA/RNA"
  source: /note="5' tri-ethylene glycol (TEG)"
  modified_base (9)..(9): 5-methyl modified nucleotide
  modified_base (12)..(12): bicyclic nucleic acid (BNA)
  modified_base (13)..(13): 5-methyl bicyclic nucleic acid
gguaaguucugtc

SEQ ID NO: 19525 - DNA, 12 bp, Artificial Sequence
  source: /note="Description of Artificial Sequence: Synthetic oligonucleotide"
  source: /note="Description of Combined DNA/RNA Molecule: Synthetic oligonucleotide"
  source: /note="DNA/RNA"
  source: /note="5' tri-ethylene glycol (TEG)"
  modified_base (9)..(9): 5-methyl modified nucleotide
  modified_base (11)..(11): bicyclic nucleic acid (BNA)
  modified_base (12)..(12): bicyclic nucleic acid (BNA)
gguaaguucugt

SEQ ID NO: 19526 - DNA, 11 bp, Artificial Sequence
  source: /note="Description of Artificial Sequence: Synthetic oligonucleotide"
  source: /note="Description of Combined DNA/RNA Molecule: Synthetic oligonucleotide"
  source: /note="DNA/RNA"
  source: /note="5' tri-ethylene glycol (TEG)"
  modified_base (9)..(9): 5-methyl modified nucleotide
  modified_base (10)..(10): bicyclic nucleic acid (BNA)
  modified_base (11)..(11): bicyclic nucleic acid (BNA)
gguaaguuctg

SEQ ID NO: 19527 - DNA, 10 bp, Artificial Sequence
  source: /note="Description of Artificial Sequence: Synthetic oligonucleotide"
  source: /note="Description of Combined DNA/RNA Molecule: Synthetic oligonucleotide"
  source: /note="DNA/RNA"
  source: /note="5' tri-ethylene glycol (TEG)"
  modified_base (9)..(9): 5-methyl bicyclic nucleic acid
  modified_base (10)..(10): bicyclic nucleic acid (BNA)
gguaaguuct

SEQ ID NO: 19528 - DNA, 9 bp, Artificial Sequence
  source: /note="Description of Artificial Sequence: Synthetic oligonucleotide"
  source: /note="Description of Combined DNA/RNA Molecule: Synthetic oligonucleotide"
  source: /note="DNA/RNA"
  source: /note="5' tri-ethylene glycol (TEG)"
  modified_base (8)..(8): bicyclic nucleic acid (BNA)
  modified_base (9)..(9): 5-methyl bicyclic nucleic acid
gguaagutc

SEQ ID NO: 19529 - DNA, 8 bp, Artificial Sequence
  source: /note="Description of Artificial Sequence: Synthetic oligonucleotide"
  source: /note="Description of Combined DNA/RNA Molecule: Synthetic oligonucleotide"
  source: /note="DNA/RNA"
  source: /note="5' tri-ethylene glycol (TEG)"
  modified_base (7)..(7): bicyclic nucleic acid (BNA)
  modified_base (8)..(8): bicyclic nucleic acid (BNA)
gguaagtt

SEQ ID NO: 19530 - RNA, 20 nt, Artificial Sequence
  source: /note="Description of Artificial Sequence: Synthetic oligonucleotide"
  source: /note="RNA"
  source: /note="5' tri-ethylene glycol (TEG)"
  modified_base (1)..(1): 5-methyl modified nucleotide
  modified_base (10)..(10): 5-methyl modified nucleotide
  modified_base (14)..(14): 5-methyl modified nucleotide
  modified_base (15)..(15): 5-methyl modified nucleotide
  modified_base (19)..(19): 5-methyl bicyclic nucleic acid
  modified_base (20)..(20): 5-methyl bicyclic nucleic acid
cgguaaguucuguccaagcc

SEQ ID NO: 19531 - RNA, 19 nt, Artificial Sequence
  source: /note="Description of Artificial Sequence: Synthetic oligonucleotide"
  source: /note="RNA"
  source: /note="5' tri-ethylene glycol (TEG)"
  modified_base (1)..(1): 5-methyl modified nucleotide
  modified_base (10)..(10): 5-methyl modified nucleotide
  modified_base (14)..(14): 5-methyl modified nucleotide
  modified_base (15)..(15): 5-methyl modified nucleotide
  modified_base (18)..(18): bicyclic nucleic acid (BNA)
  modified_base (19)..(19): 5-methyl bicyclic nucleic acid
cgguaaguucuguccaagc

SEQ ID NO: 19532 - RNA, 18 nt, Artificial Sequence
  source: /note="Description of Artificial Sequence: Synthetic oligonucleotide"
  source: /note="RNA"
  source: /note="5' tri-ethylene glycol (TEG)"
  modified_base (1)..(1): 5-methyl modified nucleotide
  modified_base (10)..(10): 5-methyl modified nucleotide
  modified_base (14)..(14): 5-methyl modified nucleotide
  modified_base (15)..(15): 5-methyl modified nucleotide
  modified_base (17)..(17): bicyclic nucleic acid (BNA)
  modified_base (18)..(18): bicyclic nucleic acid (BNA)
cgguaaguucuguccaag

SEQ ID NO: 19533 - RNA, 17 nt, Artificial Sequence
  source: /note="Description of Artificial Sequence: Synthetic oligonucleotide"
  source: /note="RNA"
  source: /note="5' tri-ethylene glycol (TEG)"
  modified_base (1)..(1): 5-methyl modified nucleotide
  modified_base (10)..(10): 5-methyl modified nucleotide
  modified_base (14)..(14): 5-methyl modified nucleotide
  modified_base (15)..(15): 5-methyl modified nucleotide
  modified_base (16)..(16): bicyclic nucleic acid (BNA)
  modified_base (17)..(17): bicyclic nucleic acid (BNA)
cgguaaguucuguccaa

SEQ ID NO: 19534 - RNA, 16 nt, Artificial Sequence
  source: /note="Description of Artificial Sequence: Synthetic oligonucleotide"
  source: /note="RNA"
  source: /note="5' tri-ethylene glycol (TEG)"
  modified_base (1)..(1): 5-methyl modified nucleotide
  modified_base (10)..(10): 5-methyl modified nucleotide
  modified_base (14)..(14): 5-methyl modified nucleotide
  modified_base (15)..(15): 5-methyl bicyclic nucleic acid
  modified_base (16)..(16): bicyclic nucleic acid (BNA)
cgguaaguucugucca

SEQ ID NO: 19535 - RNA, 15 nt, Artificial Sequence
  source: /note="Description of Artificial Sequence: Synthetic oligonucleotide"
  source: /note="RNA"
  source: /note="5' tri-ethylene glycol (TEG)"
  modified_base (1)..(1): 5-methyl modified nucleotide
  modified_base (10)..(10): 5-methyl modified nucleotide
  modified_base (14)..(14): 5-methyl bicyclic nucleic acid
  modified_base (15)..(15): 5-methyl bicyclic nucleic acid
cgguaaguucugucc

SEQ ID NO: 19536 - DNA, 14 bp, Artificial Sequence
  source: /note="Description of Artificial Sequence: Synthetic oligonucleotide"
  source: /note="Description of Combined DNA/RNA Molecule: Synthetic oligonucleotide"
  source: /note="DNA/RNA"
  source: /note="5' tri-ethylene glycol (TEG)"
  modified_base (1)..(1): 5-methyl modified nucleotide
  modified_base (10)..(10): 5-methyl modified nucleotide
  modified_base (13)..(13): bicyclic nucleic acid (BNA)
  modified_base (14)..(14): 5-methyl bicyclic nucleic acid
cgguaaguucugtc

SEQ ID NO: 19537 - DNA, 13 bp, Artificial Sequence
  source: /note="Description of Artificial Sequence: Synthetic oligonucleotide"
  source: /note="Description of Combined DNA/RNA Molecule: Synthetic oligonucleotide"
  source: /note="DNA/RNA"
  source: /note="5' tri-ethylene glycol (TEG)"
  modified_base (1)..(1): 5-methyl modified nucleotide
  modified_base (10)..(10): 5-methyl modified nucleotide
  modified_base (12)..(12): bicyclic nucleic acid (BNA)
  modified_base (13)..(13): bicyclic nucleic acid (BNA)
cgguaaguucugt

SEQ ID NO: 19538 - DNA, 12 bp, Artificial Sequence
  source: /note="Description of Artificial Sequence: Synthetic oligonucleotide"
  source: /note="Description of Combined DNA/RNA Molecule: Synthetic oligonucleotide"
  source: /note="DNA/RNA"
  source: /note="5' tri-ethylene glycol (TEG)"
  modified_base (1)..(1): 5-methyl modified nucleotide
  modified_base (10)..(10): 5-methyl modified nucleotide
  modified_base (11)..(11): bicyclic nucleic acid (BNA)
  modified_base (12)..(12): bicyclic nucleic acid (BNA)
cgguaaguuctg

SEQ ID NO: 19539 - DNA, 11 bp, Artificial Sequence
  source: /note="Description of Artificial Sequence: Synthetic oligonucleotide"
  source: /note="Description of Combined DNA/RNA Molecule: Synthetic oligonucleotide"
  source: /note="DNA/RNA"
  source: /note="5' tri-ethylene glycol (TEG)"
  modified_base (1)..(1): 5-methyl modified nucleotide
  modified_base (10)..(10): 5-methyl bicyclic nucleic acid
  modified_base (11)..(11): bicyclic nucleic acid (BNA)
cgguaaguuct

SEQ ID NO: 19540 - DNA, 10 bp, Artificial Sequence
  source: /note="Description of Artificial Sequence: Synthetic oligonucleotide"
  source: /note="Description of Combined DNA/RNA Molecule: Synthetic oligonucleotide"
  source: /note="DNA/RNA"
  source: /note="5' tri-ethylene glycol (TEG)"
  modified_base (1)..(1): 5-methyl modified nucleotide
  modified_base (9)..(9): bicyclic nucleic acid (BNA)
  modified_base (10)..(10): 5-methyl bicyclic nucleic acid
cgguaagutc

SEQ ID NO: 19541 - DNA, 9 bp, Artificial Sequence
  source: /note="Description of Artificial Sequence: Synthetic oligonucleotide"
  source: /note="Description of Combined DNA/RNA Molecule: Synthetic oligonucleotide"
  source: /note="DNA/RNA"
  source: /note="5' tri-ethylene glycol (TEG)"
  modified_base (1)..(1): 5-methyl modified nucleotide
  modified_base (8)..(8): bicyclic nucleic acid (BNA)
  modified_base (9)..(9): bicyclic nucleic acid (BNA)
cgguaagtt

SEQ ID NO: 19542 - DNA, 8 bp, Artificial Sequence
  source: /note="Description of Artificial Sequence: Synthetic oligonucleotide"
  source: /note="Description of Combined DNA/RNA Molecule: Synthetic oligonucleotide"
  source: /note="DNA/RNA"
  source: /note="5' tri-ethylene glycol (TEG)"
  modified_base (1)..(1): 5-methyl modified nucleotide
  modified_base (7)..(7): bicyclic nucleic acid (BNA)
  modified_base (8)..(8): bicyclic nucleic acid (BNA)
cgguaagt

SEQ ID NO: 19543 - RNA, 20 nt, Artificial Sequence
  source: /note="Description of Artificial Sequence: Synthetic oligonucleotide"
  source: /note="RNA"
  source: /note="5' tri-ethylene glycol (TEG)"
  modified_base (2)..(2): 5-methyl modified nucleotide
  modified_base (11)..(11): 5-methyl modified nucleotide
  modified_base (15)..(15): 5-methyl modified nucleotide
  modified_base (16)..(16): 5-methyl modified nucleotide
  modified_base (19)..(19): bicyclic nucleic acid (BNA)
  modified_base (20)..(20): 5-methyl bicyclic nucleic acid
ucgguaaguucuguccaagc

SEQ ID NO: 19544 - RNA, 19 nt, Artificial Sequence
  source: /note="Description of Artificial Sequence: Synthetic oligonucleotide"
  source: /note="RNA"
  source: /note="5' tri-ethylene glycol (TEG)"
  modified_base (2)..(2): 5-methyl modified nucleotide
  modified_base (11)..(11): 5-methyl modified nucleotide
  modified_base (15)..(15): 5-methyl modified nucleotide
  modified_base (16)..(16): 5-methyl modified nucleotide
  modified_base (18)..(18): bicyclic nucleic acid (BNA)
  modified_base (19)..(19): bicyclic nucleic acid (BNA)
ucgguaaguucuguccaag

SEQ ID NO: 19545 - RNA, 18 nt, Artificial Sequence
  source: /note="Description of Artificial Sequence: Synthetic oligonucleotide"
  source: /note="RNA"
  source: /note="5' tri-ethylene glycol (TEG)"
  modified_base (2)..(2): 5-methyl modified nucleotide
  modified_base (11)..(11): 5-methyl modified nucleotide
  modified_base (15)..(15): 5-methyl modified nucleotide
  modified_base (16)..(16): 5-methyl modified nucleotide
  modified_base (17)..(17): bicyclic nucleic acid (BNA)
  modified_base (18)..(18): bicyclic nucleic acid (BNA)
ucgguaaguucuguccaa

SEQ ID NO: 19546 - RNA, 17 nt, Artificial Sequence
  source: /note="Description of Artificial Sequence: Synthetic oligonucleotide"
  source: /note="RNA"
  source: /note="5' tri-ethylene glycol (TEG)"
  modified_base (2)..(2): 5-methyl modified nucleotide
  modified_base (11)..(11): 5-methyl modified nucleotide
  modified_base (15)..(15): 5-methyl modified nucleotide
  modified_base (16)..(16): 5-methyl bicyclic nucleic acid
  modified_base (17)..(17): bicyclic nucleic acid (BNA)
ucgguaaguucugucca

SEQ ID NO: 19547 - RNA, 16 nt, Artificial Sequence
  source: /note="Description of Artificial Sequence: Synthetic oligonucleotide"
  source: /note="RNA"
  source: /note="5' tri-ethylene glycol (TEG)"
  modified_base (2)..(2): 5-methyl modified nucleotide
  modified_base (11)..(11): 5-methyl modified nucleotide
  modified_base (15)..(15): 5-methyl bicyclic nucleic acid
  modified_base (16)..(16): 5-methyl bicyclic nucleic acid
ucgguaaguucugucc

SEQ ID NO: 19548 - DNA, 15 bp, Artificial Sequence
  source: /note="Description of Artificial Sequence: Synthetic oligonucleotide"
  source: /note="Description of Combined DNA/RNA Molecule: Synthetic oligonucleotide"
  source: /note="DNA/RNA"
  source: /note="5' tri-ethylene glycol (TEG)"
  modified_base (2)..(2): 5-methyl modified nucleotide
  modified_base (11)..(11): 5-methyl modified nucleotide
  modified_base (14)..(14): bicyclic nucleic acid (BNA)
  modified_base (15)..(15): 5-methyl bicyclic nucleic acid
ucgguaaguucugtc

SEQ ID NO: 19549 - DNA, 14 bp, Artificial Sequence
  source: /note="Description of Artificial Sequence: Synthetic oligonucleotide"
  source: /note="Description of Combined DNA/RNA Molecule: Synthetic oligonucleotide"
  source: /note="DNA/RNA"
  source: /note="5' tri-ethylene glycol (TEG)"
  modified_base (2)..(2): 5-methyl modified nucleotide
  modified_base (11)..(11): 5-methyl modified nucleotide
  modified_base (13)..(13): bicyclic nucleic acid (BNA)
  modified_base (14)..(14): bicyclic nucleic acid (BNA)
ucgguaaguucugt

SEQ ID NO: 19550 - DNA, 13 bp, Artificial Sequence
  source: /note="Description of Artificial Sequence: Synthetic oligonucleotide"
  source: /note="Description of Combined DNA/RNA Molecule: Synthetic oligonucleotide"
  source: /note="DNA/RNA"
  source: /note="5' tri-ethylene glycol (TEG)"
  modified_base (2)..(2): 5-methyl modified nucleotide
  modified_base (11)..(11): 5-methyl modified nucleotide
  modified_base (12)..(12): bicyclic nucleic acid (BNA)
  modified_base (13)..(13): bicyclic nucleic acid (BNA)
ucgguaaguuctg

SEQ ID NO: 19551 - DNA, 12 bp, Artificial Sequence
  source: /note="Description of Artificial Sequence: Synthetic oligonucleotide"
  source: /note="Description of Combined DNA/RNA Molecule: Synthetic oligonucleotide"
  source: /note="DNA/RNA"
  source: /note="5' tri-ethylene glycol (TEG)"
  modified_base (2)..(2): 5-methyl modified nucleotide
  modified_base (11)..(11): 5-methyl bicyclic nucleic acid
  modified_base (12)..(12): bicyclic nucleic acid (BNA)
ucgguaaguuct

SEQ ID NO: 19552 - DNA, 11 bp, Artificial Sequence
  source: /note="Description of Artificial Sequence: Synthetic oligonucleotide"
  source: /note="Description of Combined DNA/RNA Molecule: Synthetic oligonucleotide"
  source: /note="DNA/RNA"
  source: /note="5' tri-ethylene glycol (TEG)"
  modified_base (2)..(2): 5-methyl modified nucleotide
  modified_base (10)..(10): bicyclic nucleic acid (BNA)
  modified_base (11)..(11): 5-methyl bicyclic nucleic acid
ucgguaagutc

SEQ ID NO: 19553 - DNA, 10 bp, Artificial Sequence
  source: /note="Description of Artificial Sequence: Synthetic oligonucleotide"
  source: /note="Description of Combined DNA/RNA Molecule: Synthetic oligonucleotide"
  source: /note="DNA/RNA"
  source: /note="5' tri-ethylene glycol (TEG)"
  modified_base (2)..(2): 5-methyl modified nucleotide
  modified_base (9)..(9): bicyclic nucleic acid (BNA)
  modified_base (10)..(10): bicyclic nucleic acid (BNA)
ucgguaagtt

SEQ ID NO: 19554 - DNA, 9 bp, Artificial Sequence
  source: /note="Description of Artificial Sequence: Synthetic oligonucleotide"
  source: /note="Description of Combined DNA/RNA Molecule: Synthetic oligonucleotide"
  source: /note="DNA/RNA"
  source: /note="5' tri-ethylene glycol (TEG)"
  modified_base (2)..(2): 5-methyl modified nucleotide
  modified_base (8)..(8): bicyclic nucleic acid (BNA)
  modified_base (9)..(9): bicyclic nucleic acid (BNA)
ucgguaagt

SEQ ID NO: 19555 - RNA, 20 nt, Artificial Sequence
  source: /note="Description of Artificial Sequence: Synthetic oligonucleotide"
  source: /note="RNA"
  source: /note="5' tri-ethylene glycol (TEG)"
  modified_base (3)..(3): 5-methyl modified nucleotide
  modified_base (12)..(12): 5-methyl modified nucleotide
  modified_base (16)..(16): 5-methyl modified nucleotide
  modified_base (17)..(17): 5-methyl modified nucleotide
  modified_base (19)..(19): bicyclic nucleic acid (BNA)
  modified_base (20)..(20): bicyclic nucleic acid (BNA)
gucgguaaguucuguccaag

SEQ ID NO: 19556 - RNA, 19 nt, Artificial Sequence
  source: /note="Description of Artificial Sequence: Synthetic oligonucleotide"
  source: /note="RNA"
  source: /note="5' tri-ethylene glycol (TEG)"
  modified_base (3)..(3): 5-methyl modified nucleotide
  modified_base (12)..(12): 5-methyl modified nucleotide
  modified_base (16)..(16): 5-methyl modified nucleotide
  modified_base (17)..(17): 5-methyl modified nucleotide
  modified_base (18)..(18): bicyclic nucleic acid (BNA)
  modified_base (19)..(19): bicyclic nucleic acid (BNA)
gucgguaaguucuguccaa

SEQ ID NO: 19557 - RNA, 18 nt, Artificial Sequence
  source: /note="Description of Artificial Sequence: Synthetic oligonucleotide"
  source: /note="RNA"
  source: /note="5' tri-ethylene glycol (TEG)"
  modified_base (3)..(3): 5-methyl modified nucleotide
  modified_base (12)..(12): 5-methyl modified nucleotide
  modified_base (16)..(16): 5-methyl modified nucleotide
  modified_base (17)..(17): 5-methyl bicyclic nucleic acid
  modified_base (18)..(18): bicyclic nucleic acid (BNA)
gucgguaaguucugucca

SEQ ID NO: 19558 - RNA, 17 nt, Artificial Sequence
  source: /note="Description of Artificial Sequence: Synthetic oligonucleotide"
  source: /note="RNA"
  source: /note="5' tri-ethylene glycol (TEG)"
  modified_base (3)..(3): 5-methyl modified nucleotide
  modified_base (12)..(12): 5-methyl modified nucleotide
  modified_base (16)..(16): 5-methyl bicyclic nucleic acid
  modified_base (17)..(17): 5-methyl bicyclic nucleic acid
gucgguaaguucugucc

SEQ ID NO: 19559 - DNA, 16 bp, Artificial Sequence
  source: /note="Description of Artificial Sequence: Synthetic oligonucleotide"
  source: /note="Description of Combined DNA/RNA Molecule: Synthetic oligonucleotide"
  source: /note="DNA/RNA"
  source: /note="5' tri-ethylene glycol (TEG)"
  modified_base (3)..(3): 5-methyl modified nucleotide
  modified_base (12)..(12): 5-methyl modified nucleotide
  modified_base (15)..(15): bicyclic nucleic acid (BNA)
  modified_base (16)..(16): 5-methyl bicyclic nucleic acid
gucgguaaguucugtc

SEQ ID NO: 19560 - DNA, 15 bp, Artificial Sequence
  source: /note="Description of Artificial Sequence: Synthetic oligonucleotide"
  source: /note="Description of Combined DNA/RNA Molecule: Synthetic oligonucleotide"
  source: /note="DNA/RNA"
  source: /note="5' tri-ethylene glycol (TEG)"
  modified_base (3)..(3): 5-methyl modified nucleotide
  modified_base (12)..(12): 5-methyl modified nucleotide
  modified_base (14)..(14): bicyclic nucleic acid (BNA)
  modified_base (15)..(15): bicyclic nucleic acid (BNA)
gucgguaaguucugt

SEQ ID NO: 19561 - DNA, 14 bp, Artificial Sequence
  source: /note="Description of Artificial Sequence: Synthetic oligonucleotide"
  source: /note="Description of Combined DNA/RNA Molecule: Synthetic oligonucleotide"
  source: /note="DNA/RNA"
  source: /note="5' tri-ethylene glycol (TEG)"
  modified_base (3)..(3): 5-methyl modified nucleotide
  modified_base (12)..(12): 5-methyl modified nucleotide
  modified_base (13)..(13): bicyclic nucleic acid (BNA)
  modified_base (14)..(14): bicyclic nucleic acid (BNA)
gucgguaaguuctg

SEQ ID NO: 19562 - DNA, 13 bp, Artificial Sequence
  source: /note="Description of Artificial Sequence: Synthetic oligonucleotide"
  source: /note="Description of Combined DNA/RNA Molecule: Synthetic oligonucleotide"
  source: /note="DNA/RNA"
  source: /note="5' tri-ethylene glycol (TEG)"
  modified_base (3)..(3): 5-methyl modified nucleotide
  modified_base (12)..(12): 5-methyl bicyclic nucleic acid
  modified_base (13)..(13): bicyclic nucleic acid (BNA)
gucgguaaguuct

SEQ ID NO: 19563 - DNA, 12 bp, Artificial Sequence
  source: /note="Description of Artificial Sequence: Synthetic oligonucleotide"
  source: /note="Description of Combined DNA/RNA Molecule: Synthetic oligonucleotide"
  source: /note="DNA/RNA"
  source: /note="5' tri-ethylene glycol (TEG)"
  modified_base (3)..(3): 5-methyl modified nucleotide
  modified_base (11)..(11): bicyclic nucleic acid (BNA)
  modified_base (12)..(12): 5-methyl bicyclic nucleic acid
gucgguaagutc

SEQ ID NO: 19564 - DNA, 11 bp, Artificial Sequence
  source: /note="Description of Artificial Sequence: Synthetic oligonucleotide"
  source: /note="Description of Combined DNA/RNA Molecule: Synthetic oligonucleotide"
  source: /note="DNA/RNA"
  source: /note="5' tri-ethylene glycol (TEG)"
  modified_base (3)..(3): 5-methyl modified nucleotide
  modified_base (10)..(10): bicyclic nucleic acid (BNA)
  modified_base (11)..(11): bicyclic nucleic acid (BNA)
gucgguaagtt

SEQ ID NO: 19565 - DNA, 10 bp, Artificial Sequence
  source: /note="Description of Artificial Sequence: Synthetic oligonucleotide"
  source: /note="Description of Combined DNA/RNA Molecule: Synthetic oligonucleotide"
  source: /note="DNA/RNA"
  source: /note="5' tri-ethylene glycol (TEG)"
  modified_base (3)..(3): 5-methyl modified nucleotide
  modified_base (9)..(9): bicyclic nucleic acid (BNA)
  modified_base (10)..(10): bicyclic nucleic acid (BNA)
gucgguaagt

SEQ ID NO: 19566 - RNA, 20 nt, Artificial Sequence
  source: /note="Description of Artificial Sequence: Synthetic oligonucleotide"
  source: /note="RNA"
  source: /note="5' tri-ethylene glycol (TEG)"
  modified_base (4)..(4): 5-methyl modified nucleotide
  modified_base (13)..(13): 5-methyl modified nucleotide
  modified_base (17)..(17): 5-methyl modified nucleotide
  modified_base (18)..(18): 5-methyl modified nucleotide
  modified_base (19)..(19): bicyclic nucleic acid (BNA)
  modified_base (20)..(20): bicyclic nucleic acid (BNA)
agucgguaaguucuguccaa

SEQ ID NO: 19567 - RNA, 19 nt, Artificial Sequence
  source: /note="Description of Artificial Sequence: Synthetic oligonucleotide"
  source: /note="RNA"
  source: /note="5' tri-ethylene glycol (TEG)"
  modified_base (4)..(4): 5-methyl modified nucleotide
  modified_base (13)..(13): 5-methyl modified nucleotide
  modified_base (17)..(17): 5-methyl modified nucleotide
  modified_base (18)..(18): 5-methyl bicyclic nucleic acid
  modified_base (19)..(19): bicyclic nucleic acid (BNA)
agucgguaaguucugucca

SEQ ID NO: 19568 - DNA, 17 bp, Artificial Sequence
  source: /note="Description of Artificial Sequence: Synthetic oligonucleotide"
  source: /note="Description of Combined DNA/RNA Molecule: Synthetic oligonucleotide"
  source: /note="DNA/RNA"
  source: /note="5' tri-ethylene glycol (TEG)"
  modified_base (4)..(4): 5-methyl modified nucleotide
  modified_base (13)..(13): 5-methyl modified nucleotide
  modified_base (16)..(16): bicyclic nucleic acid (BNA)
  modified_base (17)..(17): 5-methyl bicyclic nucleic acid
agucgguaaguucugtc

SEQ ID NO: 19569 - DNA, 16 bp, Artificial Sequence
  source: /note="Description of Artificial Sequence: Synthetic oligonucleotide"
  source: /note="Description of Combined DNA/RNA Molecule: Synthetic oligonucleotide"
  source: /note="DNA/RNA"
  source: /note="5' tri-ethylene glycol (TEG)"
  modified_base (4)..(4): 5-methyl modified nucleotide
  modified_base (13)..(13): 5-methyl modified nucleotide
  modified_base (15)..(15): bicyclic nucleic acid (BNA)
  modified_base (16)..(16): bicyclic nucleic acid (BNA)
agucgguaaguucugt

SEQ ID NO: 19570 - DNA, 15 bp, Artificial Sequence
  source: /note="Description of Artificial Sequence: Synthetic oligonucleotide"
  source: /note="Description of Combined DNA/RNA Molecule: Synthetic oligonucleotide"
  source: /note="DNA/RNA"
  source: /note="5' tri-ethylene glycol (TEG)"
  modified_base (4)..(4): 5-methyl modified nucleotide
  modified_base (13)..(13): 5-methyl modified nucleotide
  modified_base (14)..(14): bicyclic nucleic acid (BNA)
  modified_base (15)..(15): bicyclic nucleic acid (BNA)
agucgguaaguuctg

SEQ ID NO: 19571 - DNA, 14 bp, Artificial Sequence
  source: /note="Description of Artificial Sequence: Synthetic oligonucleotide"
  source: /note="Description of Combined DNA/RNA Molecule: Synthetic oligonucleotide"
  source: /note="DNA/RNA"
  source: /note="5' tri-ethylene glycol (TEG)"
  modified_base (4)..(4): 5-methyl modified nucleotide
  modified_base (13)..(13): 5-methyl bicyclic nucleic acid
  modified_base (14)..(14): bicyclic nucleic acid (BNA)
agucgguaaguuct

SEQ ID NO: 19572 - DNA, 13 bp, Artificial Sequence
  source: /note="Description of Artificial Sequence: Synthetic oligonucleotide"
  source: /note="Description of Combined DNA/RNA Molecule: Synthetic oligonucleotide"
  source: /note="DNA/RNA"
  source: /note="5' tri-ethylene glycol (TEG)"
  modified_base (4)..(4): 5-methyl modified nucleotide
  modified_base (12)..(12): bicyclic nucleic acid (BNA)
  modified_base (13)..(13): 5-methyl bicyclic nucleic acid
agucgguaagutc

SEQ ID NO: 19573 - DNA, 12 bp, Artificial Sequence
  source: /note="Description of Artificial Sequence: Synthetic oligonucleotide"
  source: /note="Description of Combined DNA/RNA Molecule: Synthetic oligonucleotide"
  source: /note="DNA/RNA"
  source: /note="5' tri-ethylene glycol (TEG)"
  modified_base (4)..(4): 5-methyl modified nucleotide
  modified_base (11)..(11): bicyclic nucleic acid (BNA)
  modified_base (12)..(12): bicyclic nucleic acid (BNA)
agucgguaagtt

SEQ ID NO: 19574 - DNA, 11 bp, Artificial Sequence
  source: /note="Description of Artificial Sequence: Synthetic oligonucleotide"
  source: /note="Description of Combined DNA/RNA Molecule: Synthetic oligonucleotide"
  source: /note="DNA/RNA"
  source: /note="5' tri-ethylene glycol (TEG)"
  modified_base (4)..(4): 5-methyl modified nucleotide
  modified_base (10)..(10): bicyclic nucleic acid (BNA)
  modified_base (11)..(11): bicyclic nucleic acid (BNA)
agucgguaagt

SEQ ID NO: 19575 - RNA, 20 nt, Artificial Sequence
  source: /note="Description of Artificial Sequence: Synthetic oligonucleotide"
  source: /note="RNA"
  source: /note="5' tri-ethylene glycol (TEG)"
  modified_base (1)..(1): 5-methyl modified nucleotide
  modified_base (5)..(5): 5-methyl modified nucleotide
  modified_base (14)..(14): 5-methyl modified nucleotide
  modified_base (18)..(18): 5-methyl modified nucleotide
  modified_base (19)..(19): 5-methyl bicyclic nucleic acid
  modified_base (20)..(20): bicyclic nucleic acid (BNA)
cagucgguaaguucugucca

SEQ ID NO: 19576 - RNA, 19 nt, Artificial Sequence
  source: /note="Description of Artificial Sequence: Synthetic oligonucleotide"
  source: /note="RNA"
  source: /note="5' tri-ethylene glycol (TEG)"
  modified_base (1)..(1): 5-methyl modified nucleotide
  modified_base (5)..(5): 5-methyl modified nucleotide
  modified_base (14)..(14): 5-methyl modified nucleotide
  modified_base (18)..(18): 5-methyl bicyclic nucleic acid
  modified_base (19)..(19): 5-methyl bicyclic nucleic acid
cagucgguaaguucugucc

SEQ ID NO: 19577 - DNA, 18 bp, Artificial Sequence
  source: /note="Description of Artificial Sequence: Synthetic oligonucleotide"
  source: /note="Description of Combined DNA/RNA Molecule: Synthetic oligonucleotide"
  source: /note="DNA/RNA"
  source: /note="5' tri-ethylene glycol (TEG)"
  modified_base (1)..(1): 5-methyl modified nucleotide
  modified_base (5)..(5): 5-methyl modified nucleotide
  modified_base (14)..(14): 5-methyl modified nucleotide
  modified_base (17)..(17): bicyclic nucleic acid (BNA)
  modified_base (18)..(18): 5-methyl bicyclic nucleic acid
cagucgguaaguucugtc

SEQ ID NO: 19578 - DNA, 17 bp, Artificial Sequence
  source: /note="Description of Artificial Sequence: Synthetic oligonucleotide"
  source: /note="Description of Combined DNA/RNA Molecule: Synthetic oligonucleotide"
  source: /note="DNA/RNA"
  source: /note="5' tri-ethylene glycol (TEG)"
  modified_base (1)..(1): 5-methyl modified nucleotide
  modified_base (5)..(5): 5-methyl modified nucleotide
  modified_base (14)..(14): 5-methyl modified nucleotide
  modified_base (16)..(16): bicyclic nucleic acid (BNA)
  modified_base (17)..(17): bicyclic nucleic acid (BNA)
cagucgguaaguucugt

SEQ ID NO: 19579 - DNA, 16 bp, Artificial Sequence
  source: /note="Description of Artificial Sequence: Synthetic oligonucleotide"
  source: /note="Description of Combined DNA/RNA Molecule: Synthetic oligonucleotide"
  source: /note="DNA/RNA"
  source: /note="5' tri-ethylene glycol (TEG)"
  modified_base (1)..(1): 5-methyl modified nucleotide
  modified_base (5)..(5): 5-methyl modified nucleotide
  modified_base (14)..(14): 5-methyl modified nucleotide
  modified_base (15)..(15): bicyclic nucleic acid (BNA)
  modified_base (16)..(16): bicyclic nucleic acid (BNA)
cagucgguaaguuctg

SEQ ID NO: 19580 - DNA, 15 bp, Artificial Sequence
  source: /note="Description of Artificial Sequence: Synthetic oligonucleotide"
  source: /note="Description of Combined DNA/RNA Molecule: Synthetic oligonucleotide"
  source: /note="DNA/RNA"
  source: /note="5' tri-ethylene glycol (TEG)"
  modified_base (1)..(1): 5-methyl modified nucleotide
  modified_base (5)..(5): 5-methyl modified nucleotide
  modified_base (14)..(14): 5-methyl bicyclic nucleic acid
  modified_base (15)..(15): bicyclic nucleic acid (BNA)
cagucgguaaguuct

SEQ ID NO: 19581 - DNA, 14 bp, Artificial Sequence
  source: /note="Description of Artificial Sequence: Synthetic oligonucleotide"
  source: /note="Description of Combined DNA/RNA Molecule: Synthetic oligonucleotide"
  source: /note="DNA/RNA"
  source: /note="5' tri-ethylene glycol (TEG)"
  modified_base (1)..(1): 5-methyl modified nucleotide
  modified_base (5)..(5): 5-methyl modified nucleotide
  modified_base (13)..(13): bicyclic nucleic acid (BNA)
  modified_base (14)..(14): 5-methyl bicyclic nucleic acid
cagucgguaagutc

SEQ ID NO: 19582 - DNA, 13 bp, Artificial Sequence
  source: /note="Description of Artificial Sequence: Synthetic oligonucleotide"
  source: /note="Description of Combined DNA/RNA Molecule: Synthetic oligonucleotide"
  source: /note="DNA/RNA"
  source: /note="5' tri-ethylene glycol (TEG)"
  modified_base (1)..(1): 5-methyl modified nucleotide
  modified_base (5)..(5): 5-methyl modified nucleotide
  modified_base (12)..(12): bicyclic nucleic acid (BNA)
  modified_base (13)..(13): bicyclic nucleic acid (BNA)
cagucgguaagtt

SEQ ID NO: 19583 - DNA, 12 bp, Artificial Sequence
  source: /note="Description of Artificial Sequence: Synthetic oligonucleotide"
  source: /note="Description of Combined DNA/RNA Molecule: Synthetic oligonucleotide"
  source: /note="DNA/RNA"
  source: /note="5' tri-ethylene glycol (TEG)"
  modified_base (1)..(1): 5-methyl modified nucleotide
  modified_base (5)..(5): 5-methyl modified nucleotide
  modified_base (11)..(11): bicyclic nucleic acid (BNA)
  modified_base (12)..(12): bicyclic nucleic acid (BNA)
cagucgguaagt

SEQ ID NO: 19584 - RNA, 20 nt, Artificial Sequence
  source: /note="Description of Artificial Sequence: Synthetic oligonucleotide"
  source: /note="RNA"
  source: /note="5' tri-ethylene glycol (TEG)"
  modified_base (1)..(1): 5-methyl modified nucleotide
  modified_base (2)..(2): 5-methyl modified nucleotide
  modified_base (6)..(6): 5-methyl modified nucleotide
  modified_base (15)..(15): 5-methyl modified nucleotide
  modified_base (19)..(19): 5-methyl bicyclic nucleic acid
  modified_base (20)..(20): 5-methyl bicyclic nucleic acid
ccagucgguaaguucugucc

SEQ ID NO: 19585 - DNA, 19 bp, Artificial Sequence
  source: /note="Description of Artificial Sequence: Synthetic oligonucleotide"
  source: /note="Description of Combined DNA/RNA Molecule: Synthetic oligonucleotide"
  source: /note="DNA/RNA"
  source: /note="5' tri-ethylene glycol (TEG)"
  modified_base (1)..(1): 5-methyl modified nucleotide
  modified_base (2)..(2): 5-methyl modified nucleotide
  modified_base (6)..(6): 5-methyl modified nucleotide
  modified_base (15)..(15): 5-methyl modified nucleotide
  modified_base (18)..(18): bicyclic nucleic acid (BNA)
  modified_base (19)..(19): 5-methyl bicyclic nucleic acid
ccagucgguaaguucugtc

SEQ ID NO: 19586 - DNA, 18 bp, Artificial Sequence
  source: /note="Description of Artificial Sequence: Synthetic oligonucleotide"
  source: /note="Description of Combined DNA/RNA Molecule: Synthetic oligonucleotide"
  source: /note="DNA/RNA"
  source: /note="5' tri-ethylene glycol (TEG)"
  modified_base (1)..(1): 5-methyl modified nucleotide
  modified_base (2)..(2): 5-methyl modified nucleotide
  modified_base (6)..(6): 5-methyl modified nucleotide
  modified_base (15)..(15): 5-methyl modified nucleotide
  modified_base (17)..(17): bicyclic nucleic acid (BNA)
  modified_base (18)..(18): bicyclic nucleic acid (BNA)
ccagucgguaaguucugt

SEQ ID NO: 19587 - DNA, 17 bp, Artificial Sequence
  source: /note="Description of Artificial Sequence: Synthetic oligonucleotide"
  source: /note="Description of Combined DNA/RNA Molecule: Synthetic oligonucleotide"
  source: /note="DNA/RNA"
  source: /note="5' tri-ethylene glycol (TEG)"
  modified_base (1)..(1): 5-methyl modified nucleotide
  modified_base (2)..(2): 5-methyl modified nucleotide
  modified_base (6)..(6): 5-methyl modified nucleotide
  modified_base (15)..(15): 5-methyl modified nucleotide
  modified_base (16)..(16): bicyclic nucleic acid (BNA)
  modified_base (17)..(17): bicyclic nucleic acid (BNA)
ccagucgguaaguuctg

SEQ ID NO: 19588 - DNA, 16 bp, Artificial Sequence
  source: /note="Description of Artificial Sequence: Synthetic oligonucleotide"
  source: /note="Description of Combined DNA/RNA Molecule: Synthetic oligonucleotide"
  source: /note="DNA/RNA"
  source: /note="5' tri-ethylene glycol (TEG)"
  modified_base (1)..(1): 5-methyl modified nucleotide
  modified_base (2)..(2): 5-methyl modified nucleotide
  modified_base (6)..(6): 5-methyl modified nucleotide
  modified_base (15)..(15): 5-methyl bicyclic nucleic acid
  modified_base (16)..(16): bicyclic nucleic acid (BNA)
ccagucgguaaguuct

SEQ ID NO: 19589 - DNA, 15 bp, Artificial Sequence
  source: /note="Description of Artificial Sequence: Synthetic oligonucleotide"
  source: /note="Description of Combined DNA/RNA Molecule: Synthetic oligonucleotide"
  source: /note="DNA/RNA"
  source: /note="5' tri-ethylene glycol (TEG)"
  modified_base (1)..(1): 5-methyl modified nucleotide
  modified_base (2)..(2): 5-methyl modified nucleotide
  modified_base (6)..(6): 5-methyl modified nucleotide
  modified_base (14)..(14): bicyclic nucleic acid (BNA)
  modified_base (15)..(15): 5-methyl bicyclic nucleic acid
ccagucgguaagutc

SEQ ID NO: 19590 - DNA, 14 bp, Artificial Sequence
  source: /note="Description of Artificial Sequence: Synthetic oligonucleotide"
  source: /note="Description of Combined DNA/RNA Molecule: Synthetic oligonucleotide"
  source: /note="DNA/RNA"
  source: /note="5' tri-ethylene glycol (TEG)"
  modified_base (1)..(1): 5-methyl modified nucleotide
  modified_base (2)..(2): 5-methyl modified nucleotide
  modified_base (6)..(6): 5-methyl modified nucleotide
  modified_base (13)..(13): bicyclic nucleic acid (BNA)
  modified_base (14)..(14): bicyclic nucleic acid (BNA)
ccagucgguaagtt

SEQ ID NO: 19591 - DNA, 13 bp, Artificial Sequence
  source: /note="Description of Artificial Sequence: Synthetic oligonucleotide"
  source: /note="Description of Combined DNA/RNA Molecule: Synthetic oligonucleotide"
  source: /note="DNA/RNA"
  source: /note="5' tri-ethylene glycol (TEG)"
  modified_base (1)..(1): 5-methyl modified nucleotide
  modified_base (2)..(2): 5-methyl modified nucleotide
  modified_base (6)..(6): 5-methyl modified nucleotide
  modified_base (12)..(12): bicyclic nucleic acid (BNA)
  modified_base (13)..(13): bicyclic nucleic acid (BNA)
ccagucgguaagt

SEQ ID NO: 19592 - DNA, 20 bp, Artificial Sequence
  source: /note="Description of Artificial Sequence: Synthetic oligonucleotide"
  source: /note="Description of Combined DNA/RNA Molecule: Synthetic oligonucleotide"
  source: /note="DNA/RNA"
  source: /note="5' tri-ethylene glycol (TEG)"
  modified_base (2)..(2): 5-methyl modified nucleotide
  modified_base (3)..(3): 5-methyl modified nucleotide
  modified_base (7)..(7): 5-methyl modified nucleotide
  modified_base (16)..(16): 5-methyl modified nucleotide
  modified_base (19)..(19): bicyclic nucleic acid (BNA)
  modified_base (20)..(20): 5-methyl bicyclic nucleic acid
gccagucgguaaguucugtc

SEQ ID NO: 19593 - DNA, 19 bp, Artificial Sequence
  source: /note="Description of Artificial Sequence: Synthetic oligonucleotide"
  source: /note="Description of Combined DNA/RNA Molecule: Synthetic oligonucleotide"
  source: /note="DNA/RNA"
  source: /note="5' tri-ethylene glycol (TEG)"
  modified_base (2)..(2): 5-methyl modified nucleotide
  modified_base (3)..(3): 5-methyl modified nucleotide
  modified_base (7)..(7): 5-methyl modified nucleotide
  modified_base (16)..(16): 5-methyl modified nucleotide
  modified_base (18)..(18): bicyclic nucleic acid (BNA)
  modified_base (19)..(19): bicyclic nucleic acid (BNA)
gccagucgguaaguucugt

SEQ ID NO: 19594 - DNA, 18 bp, Artificial Sequence
  source: /note="Description of Artificial Sequence: Synthetic oligonucleotide"
  source: /note="Description of Combined DNA/RNA Molecule: Synthetic oligonucleotide"
  source: /note="DNA/RNA"
  source: /note="5' tri-ethylene glycol (TEG)"
  modified_base (2)..(2): 5-methyl modified nucleotide
  modified_base (3)..(3): 5-methyl modified nucleotide
  modified_base (7)..(7): 5-methyl modified nucleotide
  modified_base (16)..(16): 5-methyl modified nucleotide
  modified_base (17)..(17): bicyclic nucleic acid (BNA)
  modified_base (18)..(18): bicyclic nucleic acid (BNA)
gccagucgguaaguuctg

SEQ ID NO: 19595 - DNA, 17 bp, Artificial Sequence
  source: /note="Description of Artificial Sequence: Synthetic oligonucleotide"
  source: /note="Description of Combined DNA/RNA Molecule: Synthetic oligonucleotide"
  source: /note="DNA/RNA"
  source: /note="5' tri-ethylene glycol (TEG)"
  modified_base (2)..(2): 5-methyl modified nucleotide
  modified_base (3)..(3): 5-methyl modified nucleotide
  modified_base (7)..(7): 5-methyl modified nucleotide
  modified_base (16)..(16): 5-methyl bicyclic nucleic acid
  modified_base (17)..(17): bicyclic nucleic acid (BNA)
gccagucgguaaguuct

SEQ ID NO: 19596 - DNA, 16 bp, Artificial Sequence
  source: /note="Description of Artificial Sequence: Synthetic oligonucleotide"
  source: /note="Description of Combined DNA/RNA Molecule: Synthetic oligonucleotide"
  source: /note="DNA/RNA"
  source: /note="5' tri-ethylene glycol (TEG)"
  modified_base (2)..(2): 5-methyl modified nucleotide
  modified_base (3)..(3): 5-methyl modified nucleotide
  modified_base (7)..(7): 5-methyl modified nucleotide
  modified_base (15)..(15): bicyclic nucleic acid (BNA)
  modified_base (16)..(16): 5-methyl bicyclic nucleic acid
gccagucgguaagutc

SEQ ID NO: 19597 - DNA, 15 bp, Artificial Sequence
  source: /note="Description of Artificial Sequence: Synthetic oligonucleotide"
  source: /note="Description of Combined DNA/RNA Molecule: Synthetic oligonucleotide"
  source: /note="DNA/RNA"
  source: /note="5' tri-ethylene glycol (TEG)"
  modified_base (2)..(2): 5-methyl modified nucleotide
  modified_base (3)..(3): 5-methyl modified nucleotide
  modified_base (7)..(7): 5-methyl modified nucleotide
  modified_base (14)..(14): bicyclic nucleic acid (BNA)
  modified_base (15)..(15): bicyclic nucleic acid (BNA)
gccagucgguaagtt

SEQ ID NO: 19598 - DNA, 14 bp, Artificial Sequence
  source: /note="Description of Artificial Sequence: Synthetic oligonucleotide"
  source: /note="Description of Combined DNA/RNA Molecule: Synthetic oligonucleotide"
  source: /note="DNA/RNA"
  source: /note="5' tri-ethylene glycol (TEG)"
  modified_base (2)..(2): 5-methyl modified nucleotide
  modified_base (3)..(3): 5-methyl modified nucleotide
  modified_base (7)..(7): 5-methyl modified nucleotide
  modified_base (13)..(13): bicyclic nucleic acid (BNA)
  modified_base (14)..(14): bicyclic nucleic acid (BNA)
gccagucgguaagt

SEQ ID NO: 19599 - DNA, 20 bp, Artificial Sequence
  source: /note="Description of Artificial Sequence: Synthetic oligonucleotide"
  source: /note="Description of Combined DNA/RNA Molecule: Synthetic oligonucleotide"
  source: /note="DNA/RNA"
  source: /note="5' tri-ethylene glycol (TEG)"
  modified_base (2)..(2): 5-methyl modified nucleotide
  modified_base (14)..(14): 5-methyl modified nucleotide
  modified_base (19)..(19): 5-methyl bicyclic nucleic acid
  modified_base (20)..(20): bicyclic nucleic acid (BNA)
ucaaggaagauggcauuuct

SEQ ID NO: 19600 - RNA, 22 nt, Artificial Sequence
  source: /note="Description of Artificial Sequence: Synthetic oligonucleotide"
  source: /note="RNA"
  source: /note="5' tri-ethylene glycol (TEG)"
  modified_base (2)..(2): 5-methyl modified nucleotide
  modified_base (14)..(14): 5-methyl modified nucleotide
  modified_base (19)..(19): 5-methyl modified nucleotide
  modified_base (21)..(21): bicyclic nucleic acid (BNA)
  modified_base (22)..(22): bicyclic nucleic acid (BNA)
ucaaggaagauggcauuucuag

SEQ ID NO: 19601 - DNA, 16 bp, Artificial Sequence
  source: /note="Description of Artificial Sequence: Synthetic oligonucleotide"
  source: /note="Description of Combined DNA/RNA Molecule: Synthetic oligonucleotide"
  source: /note="DNA/RNA"
  source: /note="5' tri-ethylene glycol (TEG)"
  modified_base (2)..(2): 5-methyl modified nucleotide
  modified_base (14)..(14): 5-methyl modified nucleotide
  modified_base (15)..(15): bicyclic nucleic acid (BNA)
  modified_base (16)..(16): bicyclic nucleic acid (BNA)
ucaaggaagauggcat

SEQ ID NO: 19602 - DNA, 15 bp, Artificial Sequence
  source: /note="Description of Artificial Sequence: Synthetic oligonucleotide"
  source: /note="Description of Combined DNA/RNA Molecule: Synthetic oligonucleotide"
  source: /note="DNA/RNA"
  source: /note="5' tri-ethylene glycol (TEG)"
  modified_base (9)..(9): 5-methyl modified nucleotide
  modified_base (14)..(14): 5-methyl bicyclic nucleic acid
  modified_base (15)..(15): bicyclic nucleic acid (BNA)
gaagauggcauuuct

SEQ ID NO: 19603 - DNA, 21 bp, Artificial Sequence
  source: /note="Description of Artificial Sequence: Synthetic oligonucleotide"
  source: /note="Description of Combined DNA/RNA Molecule: Synthetic oligonucleotide"
  source: /note="DNA/RNA"
  source: /note="5' tri-ethylene glycol (TEG)"
  modified_base (2)..(2): 5-methyl modified nucleotide
  modified_base (14)..(14): 5-methyl modified nucleotide
  modified_base (19)..(19): 5-methyl modified nucleotide
  modified_base (20)..(20): bicyclic nucleic acid (BNA)
  modified_base (21)..(21): bicyclic nucleic acid (BNA)
ucaaggaagauggcauuucta

SEQ ID NO: 19604 - DNA, 19 bp, Artificial Sequence
  source: /note="Description of Artificial Sequence: Synthetic oligonucleotide"
  source: /note="Description of Combined DNA/RNA Molecule: Synthetic oligonucleotide"
  source: /note="DNA/RNA"
  source: /note="5' tri-ethylene glycol (TEG)"
  modified_base (2)..(2): 5-methyl modified nucleotide
  modified_base (14)..(14): 5-methyl modified nucleotide
  modified_base (18)..(18): bicyclic nucleic acid (BNA)
  modified_base (19)..(19): 5-methyl bicyclic nucleic acid
ucaaggaagauggcauutc

SEQ ID NO: 19605 - DNA, 18 bp, Artificial Sequence
  source: /note="Description of Artificial Sequence: Synthetic oligonucleotide"
  source: /note="Description of Combined DNA/RNA Molecule: Synthetic oligonucleotide"
  source: /note="DNA/RNA"
  source: /note="5' tri-ethylene glycol (TEG)"
  modified_base (2)..(2): 5-methyl modified nucleotide
  modified_base (14)..(14): 5-methyl modified nucleotide
  modified_base (17)..(17): bicyclic nucleic acid (BNA)
  modified_base (18)..(18): bicyclic nucleic acid (BNA)
ucaaggaagauggcautt

SEQ ID NO: 19606 - DNA, 17 bp, Artificial Sequence
  source: /note="Description of Artificial Sequence: Synthetic oligonucleotide"
  source: /note="Description of Combined DNA/RNA Molecule: Synthetic oligonucleotide"
  source: /note="DNA/RNA"
  source: /note="5' tri-ethylene glycol (TEG)"
  modified_base (2)..(2): 5-methyl modified nucleotide
  modified_base (14)..(14): 5-methyl modified nucleotide
  modified_base (16)..(16): bicyclic nucleic acid (BNA)
  modified_base (17)..(17): bicyclic nucleic acid (BNA)
ucaaggaagauggcatt

SEQ ID NO: 19607 - RNA, 15 nt, Artificial Sequence
  source: /note="Description of Artificial Sequence: Synthetic oligonucleotide"
  source: /note="RNA"
  source: /note="5' tri-ethylene glycol (TEG)"
  modified_base (2)..(2): 5-methyl modified nucleotide
  modified_base (14)..(14): 5-methyl bicyclic nucleic acid
  modified_base (15)..(15): bicyclic nucleic acid (BNA)
ucaaggaagauggca

SEQ ID NO: 19608 - RNA, 14 nt, Artificial Sequence
  source: /note="Description of Artificial Sequence: Synthetic oligonucleotide"
  source: /note="RNA"
  source: /note="5' tri-ethylene glycol (TEG)"
  modified_base (2)..(2): 5-methyl modified nucleotide
  modified_base (13)..(13): bicyclic nucleic acid (BNA)
  modified_base (14)..(14): 5-methyl bicyclic nucleic acid
ucaaggaagauggc

SEQ ID NO: 19609 - RNA, 13 nt, Artificial Sequence
  source: /note="Description of Artificial Sequence: Synthetic oligonucleotide"
  source: /note="RNA"
  source: /note="5' tri-ethylene glycol (TEG)"
  modified_base (2)..(2): 5-methyl modified nucleotide
  modified_base (12)..(12): bicyclic nucleic acid (BNA)
  modified_base (13)..(13): bicyclic nucleic acid (BNA)
ucaaggaagaugg

SEQ ID NO: 19610 - DNA, 12 bp, Artificial Sequence
  source: /note="Description of Artificial Sequence: Synthetic oligonucleotide"
  source: /note="Description of Combined DNA/RNA Molecule: Synthetic oligonucleotide"
  source: /note="DNA/RNA"
  source: /note="5' tri-ethylene glycol (TEG)"
  modified_base (2)..(2): 5-methyl modified nucleotide
  modified_base (11)..(11): bicyclic nucleic acid (BNA)
  modified_base (12)..(12): bicyclic nucleic acid (BNA)
ucaaggaagatg

SEQ ID NO: 19611 - DNA, 11 bp, Artificial Sequence
  source: /note="Description of Artificial Sequence: Synthetic oligonucleotide"
  source: /note="Description of Combined DNA/RNA Molecule: Synthetic oligonucleotide"
  source: /note="DNA/RNA"
  source: /note="5' tri-ethylene glycol (TEG)"
  modified_base (2)..(2): 5-methyl modified nucleotide
  modified_base (10)..(10): bicyclic nucleic acid (BNA)
  modified_base (11)..(11): bicyclic nucleic acid (BNA)
ucaaggaagat

SEQ ID NO: 19612 - RNA, 10 nt, Artificial Sequence
  source: /note="Description of Artificial Sequence: Synthetic oligonucleotide"
  source: /note="RNA"
  source: /note="5' tri-ethylene glycol (TEG)"
  modified_base (2)..(2): 5-methyl modified nucleotide
  modified_base (9)..(9): bicyclic nucleic acid (BNA)
  modified_base (10)..(10): bicyclic nucleic acid (BNA)
ucaaggaaga

SEQ ID NO: 19613 - RNA, 9 nt, Artificial Sequence
  source: /note="Description of Artificial Sequence: Synthetic oligonucleotide"
  source: /note="RNA"
  source: /note="5' tri-ethylene glycol (TEG)"
  modified_base (2)..(2): 5-methyl modified nucleotide
  modified_base (8)..(8): bicyclic nucleic acid (BNA)
  modified_base (9)..(9): bicyclic nucleic acid (BNA)
ucaaggaag

SEQ ID NO: 19614 - RNA, 21 nt, Artificial Sequence
  source: /note="Description of Artificial Sequence: Synthetic oligonucleotide"
  source: /note="RNA"
  source: /note="5' tri-ethylene glycol (TEG)"
  modified_base (1)..(1): 5-methyl modified nucleotide
  modified_base (13)..(13): 5-methyl modified nucleotide
  modified_base (18)..(18): 5-methyl modified nucleotide
  modified_base (20)..(20): bicyclic nucleic acid (BNA)
  modified_base (21)..(21): bicyclic nucleic acid (BNA)
caaggaagauggcauuucuag

SEQ ID NO: 19615 - DNA, 20 bp, Artificial Sequence
  source: /note="Description of Artificial Sequence: Synthetic oligonucleotide"
  source: /note="Description of Combined DNA/RNA Molecule: Synthetic oligonucleotide"
  source: /note="DNA/RNA"
  source: /note="5' tri-ethylene glycol (TEG)"
  modified_base (1)..(1): 5-methyl modified nucleotide
  modified_base (13)..(13): 5-methyl modified nucleotide
  modified_base (18)..(18): 5-methyl modified nucleotide
  modified_base (19)..(19): bicyclic nucleic acid (BNA)
  modified_base (20)..(20): bicyclic nucleic acid (BNA)
caaggaagauggcauuucta

SEQ ID NO: 19616 - DNA, 19 bp, Artificial Sequence
  source: /note="Description of Artificial Sequence: Synthetic oligonucleotide"
  source: /note="Description of Combined DNA/RNA Molecule: Synthetic oligonucleotide"
  source: /note="DNA/RNA"
  source: /note="5' tri-ethylene glycol (TEG)"
  modified_base (1)..(1): 5-methyl modified nucleotide
  modified_base (13)..(13): 5-methyl modified nucleotide
  modified_base (18)..(18): 5-methyl bicyclic nucleic acid
  modified_base (19)..(19): bicyclic nucleic acid (BNA)
caaggaagauggcauuuct

SEQ ID NO: 19617 - DNA, 18 bp, Artificial Sequence
  source: /note="Description of Artificial Sequence: Synthetic oligonucleotide"
  source: /note="Description of Combined DNA/RNA Molecule: Synthetic oligonucleotide"
  source: /note="DNA/RNA"
  source: /note="5' tri-ethylene glycol (TEG)"
  modified_base (1)..(1): 5-methyl modified nucleotide
  modified_base (13)..(13): 5-methyl modified nucleotide
  modified_base (17)..(17): bicyclic nucleic acid (BNA)
  modified_base (18)..(18): 5-methyl bicyclic nucleic acid
caaggaagauggcauutc

SEQ ID NO: 19618 - DNA, 17 bp, Artificial Sequence
  source: /note="Description of Artificial Sequence: Synthetic oligonucleotide"
  source: /note="Description of Combined DNA/RNA Molecule: Synthetic oligonucleotide"
  source: /note="DNA/RNA"
  source: /note="5' tri-ethylene glycol (TEG)"
  modified_base (1)..(1): 5-methyl modified nucleotide
  modified_base (13)..(13): 5-methyl modified nucleotide
  modified_base (16)..(16): bicyclic nucleic acid (BNA)
  modified_base (17)..(17): bicyclic nucleic acid (BNA)
caaggaagauggcautt

SEQ ID NO: 19619 - DNA, 16 bp, Artificial Sequence
  source: /note="Description of Artificial Sequence: Synthetic oligonucleotide"
  source: /note="Description of Combined DNA/RNA Molecule: Synthetic oligonucleotide"
  source: /note="DNA/RNA"
  source: /note="5' tri-ethylene glycol (TEG)"
  modified_base (1)..(1): 5-methyl modified nucleotide
  modified_base (13)..(13): 5-methyl modified nucleotide
  modified_base (15)..(15): bicyclic nucleic acid (BNA)
  modified_base (16)..(16): bicyclic nucleic acid (BNA)
caaggaagauggcatt

SEQ ID NO: 19620 - DNA, 15 bp, Artificial Sequence
  source: /note="Description of Artificial Sequence: Synthetic oligonucleotide"
  source: /note="Description of Combined DNA/RNA Molecule: Synthetic oligonucleotide"
  source: /note="DNA/RNA"
  source: /note="5' tri-ethylene glycol (TEG)"
  modified_base (1)..(1): 5-methyl modified nucleotide
  modified_base (13)..(13): 5-methyl modified nucleotide
  modified_base (14)..(14): bicyclic nucleic acid (BNA)
  modified_base (15)..(15): bicyclic nucleic acid (BNA)
caaggaagauggcat

SEQ ID NO: 19621 - RNA, 14 nt, Artificial Sequence
  source: /note="Description of Artificial Sequence: Synthetic oligonucleotide"
  source: /note="RNA"
  source: /note="5' tri-ethylene glycol (TEG)"
  modified_base (1)..(1): 5-methyl modified nucleotide
  modified_base (13)..(13): 5-methyl bicyclic nucleic acid
  modified_base (14)..(14): bicyclic nucleic acid (BNA)
caaggaagauggca

SEQ ID NO: 19622 - RNA, 13 nt, Artificial Sequence
  source: /note="Description of Artificial Sequence: Synthetic oligonucleotide"
  source: /note="RNA"
  source: /note="5' tri-ethylene glycol (TEG)"
  modified_base (1)..(1): 5-methyl modified nucleotide
  modified_base (12)..(12): bicyclic nucleic acid (BNA)
  modified_base (13)..(13): 5-methyl bicyclic nucleic acid
caaggaagauggc

SEQ ID NO: 19623 - RNA, 12 nt, Artificial Sequence
  source: /note="Description of Artificial Sequence: Synthetic oligonucleotide"
  source: /note="RNA"
  source: /note="5' tri-ethylene glycol (TEG)"
  modified_base (1)..(1): 5-methyl modified nucleotide
  modified_base (11)..(11): bicyclic nucleic acid (BNA)
  modified_base (12)..(12): bicyclic nucleic acid (BNA)
caaggaagaugg

SEQ ID NO: 19624 - DNA, 11 bp, Artificial Sequence
  source: /note="Description of Artificial Sequence: Synthetic oligonucleotide"
  source: /note="DNA/RNA"
  source: /note="5' tri-ethylene glycol (TEG)"
  modified_base (1)..(1): 5-methyl modified nucleotide
  modified_base (10)..(10): bicyclic nucleic acid (BNA)
  modified_base (11)..(11): bicyclic nucleic acid (BNA)
caaggaagatg

SEQ ID NO: 19625 - DNA, 10 bp, Artificial Sequence
  source: /note="Description of Artificial Sequence: Synthetic oligonucleotide"
  source: /note="DNA/RNA"
  source: /note="5' tri-ethylene glycol (TEG)"
  modified_base (1)..(1): 5-methyl modified nucleotide
  modified_base (9)..(9): bicyclic nucleic acid (BNA)
  modified_base (10)..(10): bicyclic nucleic acid (BNA)
caaggaagat

SEQ ID NO: 19626 - RNA, 9 nt, Artificial Sequence
  source: /note="Description of Artificial Sequence: Synthetic oligonucleotide"
  source: /note="RNA/Antisense Oligonucleotide"
  source: /note="5' tri-ethylene glycol (TEG)"
  modified_base (1)..(1): 5-methyl modified nucleotide
  modified_base (8)..(8): bicyclic nucleic acid (BNA)
  modified_base (9)..(9): bicyclic nucleic acid (BNA)
caaggaaga

SEQ ID NO: 19627 - RNA, 8 nt, Artificial Sequence
  source: /note="Description of Artificial Sequence: Synthetic oligonucleotide"
  source: /note="RNA/Antisense Oligonucleotide"
  source: /note="5' tri-ethylene glycol (TEG)"
  modified_base (1)..(1): 5-methyl modified nucleotide
  modified_base (7)..(7): bicyclic nucleic acid (BNA)
  modified_base (8)..(8): bicyclic nucleic acid (BNA)
caaggaag

SEQ ID NO: 19628 - RNA, 20 nt, Artificial Sequence
  source: /note="Description of Artificial Sequence: Synthetic oligonucleotide"
  source: /note="RNA"
  source: /note="5' tri-ethylene glycol (TEG)"
  modified_base (12)..(12): 5-methyl modified nucleotide
  modified_base (17)..(17): 5-methyl modified nucleotide
  modified_base (19)..(19): bicyclic nucleic acid (BNA)
  modified_base (20)..(20): bicyclic nucleic acid (BNA)
aaggaagauggcauuucuag

SEQ ID NO: 19629 - DNA, 19 bp, Artificial Sequence
  source: /note="Description of Artificial Sequence: Synthetic oligonucleotide"
  source: /note="Description of Combined DNA/RNA Molecule: Synthetic oligonucleotide"
  source: /note="DNA/RNA"
  source: /note="5' tri-ethylene glycol (TEG)"
  modified_base (12)..(12): 5-methyl modified nucleotide
  modified_base (17)..(17): 5-methyl modified nucleotide
  modified_base (18)..(18): bicyclic nucleic acid (BNA)
  modified_base (19)..(19): bicyclic nucleic acid (BNA)
aaggaagauggcauuucta

SEQ ID NO: 19630 - DNA, 18 bp, Artificial Sequence
  source: /note="Description of Artificial Sequence: Synthetic oligonucleotide"
  source: /note="Description of Combined DNA/RNA Molecule: Synthetic oligonucleotide"
  source: /note="DNA/RNA"
  source: /note="5' tri-ethylene glycol (TEG)"
  modified_base (12)..(12): 5-methyl modified nucleotide
  modified_base (17)..(17): 5-methyl bicyclic nucleic acid
  modified_base (18)..(18): bicyclic nucleic acid (BNA)
aaggaagauggcauuuct

SEQ ID NO: 19631 - DNA, 17 bp, Artificial Sequence
  source: /note="Description of Artificial Sequence: Synthetic oligonucleotide"
  source: /note="Description of Combined DNA/RNA Molecule: Synthetic oligonucleotide"
  source: /note="DNA/RNA"
  source: /note="5' tri-ethylene glycol (TEG)"
  modified_base (12)..(12): 5-methyl modified nucleotide
  modified_base (16)..(16): bicyclic nucleic acid (BNA)
  modified_base (17)..(17): 5-methyl bicyclic nucleic acid
aaggaagauggcauutc

SEQ ID NO: 19632 - DNA, 16 bp, Artificial Sequence
  source: /note="Description of Artificial Sequence: Synthetic oligonucleotide"
  source: /note="Description of Combined DNA/RNA Molecule: Synthetic oligonucleotide"
  source: /note="DNA/RNA"
  source: /note="5' tri-ethylene glycol (TEG)"
  modified_base (12)..(12): 5-methyl modified nucleotide
  modified_base (15)..(15): bicyclic nucleic acid (BNA)
  modified_base (16)..(16): bicyclic nucleic acid (BNA)
aaggaagauggcautt

SEQ ID NO: 19633 - DNA, 15 bp, Artificial Sequence
  source: /note="Description of Artificial Sequence: Synthetic oligonucleotide"
  source: /note="Description of Combined DNA/RNA Molecule: Synthetic oligonucleotide"
  source: /note="DNA/RNA"
  source: /note="5' tri-ethylene glycol (TEG)"
  modified_base (12)..(12): 5-methyl modified nucleotide
  modified_base (14)..(14): bicyclic nucleic acid (BNA)
  modified_base (15)..(15): bicyclic nucleic acid (BNA)
aaggaagauggcatt

SEQ ID NO: 19634 - DNA, 14 bp, Artificial Sequence
  source: /note="Description of Artificial Sequence: Synthetic oligonucleotide"
  source: /note="Description of Combined DNA/RNA Molecule: Synthetic oligonucleotide"
  source: /note="DNA/RNA"
  source: /note="5' tri-ethylene glycol (TEG)"
  modified_base (12)..(12): 5-methyl modified nucleotide
  modified_base (13)..(13): bicyclic nucleic acid (BNA)
  modified_base (14)..(14): bicyclic nucleic acid (BNA)
aaggaagauggcat

SEQ ID NO: 19635 - RNA, 13 nt, Artificial Sequence
  source: /note="Description of Artificial Sequence: Synthetic oligonucleotide"
  source: /note="RNA"
  source: /note="5' tri-ethylene glycol (TEG)"
  modified_base (12)..(12): 5-methyl bicyclic nucleic acid
  modified_base (13)..(13): bicyclic nucleic acid (BNA)
aaggaagauggca

SEQ ID NO: 19636 - RNA, 12 nt, Artificial Sequence
  source: /note="Description of Artificial Sequence: Synthetic oligonucleotide"
  source: /note="RNA"
  source: /note="5' tri-ethylene glycol (TEG)"
  modified_base (11)..(11): bicyclic nucleic acid (BNA)
  modified_base (12)..(12): 5-methyl bicyclic nucleic acid
aaggaagauggc

SEQ ID NO: 19637 - RNA, 11 nt, Artificial Sequence
  source: /note="Description of Artificial Sequence: Synthetic oligonucleotide"
  source: /note="RNA"
  source: /note="5' tri-ethylene glycol (TEG)"
  modified_base (10)..(10): bicyclic nucleic acid (BNA)
  modified_base (11)..(11): bicyclic nucleic acid (BNA)
aaggaagaugg

SEQ ID NO: 19638 - DNA, 10 bp, Artificial Sequence
  source: /note="Description of Artificial Sequence: Synthetic oligonucleotide"
  source: /note="DNA/RNA"
  source: /note="5' tri-ethylene glycol (TEG)"
  modified_base (9)..(9): bicyclic nucleic acid (BNA)
  modified_base (10)..(10): bicyclic nucleic acid (BNA)
aaggaagatg

SEQ ID NO: 19639 - DNA, 9 bp, Artificial Sequence
  source: /note="Description of Artificial Sequence: Synthetic oligonucleotide"
  source: /note="DNA/RNA"
  source: /note="5' tri-ethylene glycol (TEG)"
  modified_base (8)..(8): bicyclic nucleic acid (BNA)
  modified_base (9)..(9): bicyclic nucleic acid (BNA)
aaggaagat

SEQ ID NO: 19640 - RNA, 8 nt, Artificial Sequence
  source: /note="Description of Artificial Sequence: Synthetic oligonucleotide"
  source: /note="RNA/Antisense Oligonucleotide"
  source: /note="5' tri-ethylene glycol (TEG)"
  modified_base (7)..(7): bicyclic nucleic acid (BNA)
  modified_base (8)..(8): bicyclic nucleic acid (BNA)
aaggaaga

SEQ ID NO: 19641 - RNA, 19 nt, Artificial Sequence
  source: /note="Description of Artificial Sequence: Synthetic oligonucleotide"
  source: /note="RNA"
  source: /note="5' tri-ethylene glycol (TEG)"
  modified_base (11)..(11): 5-methyl modified nucleotide
  modified_base (16)..(16): 5-methyl modified nucleotide
  modified_base (18)..(18): bicyclic nucleic acid (BNA)
  modified_base (19)..(19): bicyclic nucleic acid (BNA)
aggaagauggcauuucuag

SEQ ID NO: 19642 - DNA, 18 bp, Artificial Sequence
  source: /note="Description of Artificial Sequence: Synthetic oligonucleotide"
  source: /note="Description of Combined DNA/RNA Molecule: Synthetic oligonucleotide"
  source: /note="DNA/RNA"
  source: /note="5' tri-ethylene glycol (TEG)"
  modified_base (11)..(11): 5-methyl modified nucleotide
  modified_base (16)..(16): 5-methyl modified nucleotide
  modified_base (17)..(17): bicyclic nucleic acid (BNA)
  modified_base (18)..(18): bicyclic nucleic acid (BNA)
aggaagauggcauuucta

SEQ ID NO: 19643 - DNA, 17 bp, Artificial Sequence
  source: /note="Description of Artificial Sequence: Synthetic oligonucleotide"
  source: /note="Description of Combined DNA/RNA Molecule: Synthetic oligonucleotide"
  source: /note="DNA/RNA"
  source: /note="5' tri-ethylene glycol (TEG)"
  modified_base (11)..(11): 5-methyl modified nucleotide
  modified_base (16)..(16): 5-methyl bicyclic nucleic acid
  modified_base (17)..(17): bicyclic nucleic acid (BNA)
aggaagauggcauuuct

SEQ ID NO: 19644 - DNA, 16 bp, Artificial Sequence
  source: /note="Description of Artificial Sequence: Synthetic oligonucleotide"
  source: /note="Description of Combined DNA/RNA Molecule: Synthetic oligonucleotide"
  source: /note="DNA/RNA"
  source: /note="5' tri-ethylene glycol (TEG)"
  modified_base (11)..(11): 5-methyl modified nucleotide
  modified_base (15)..(15): bicyclic nucleic acid (BNA)
  modified_base (16)..(16): 5-methyl bicyclic nucleic acid
aggaagauggcauutc

SEQ ID NO: 19645 - DNA, 15 bp, Artificial Sequence
  source: /note="Description of Artificial Sequence: Synthetic oligonucleotide"
  source: /note="Description of Combined DNA/RNA Molecule: Synthetic oligonucleotide"
  source: /note="DNA/RNA"
  source: /note="5' tri-ethylene glycol (TEG)"
  modified_base (11)..(11): 5-methyl modified nucleotide
  modified_base (14)..(14): bicyclic nucleic acid (BNA)
  modified_base (15)..(15): bicyclic nucleic acid (BNA)
aggaagauggcautt

SEQ ID NO: 19646 - DNA, 14 bp, Artificial Sequence
  source: /note="Description of Artificial Sequence: Synthetic oligonucleotide"
  source: /note="Description of Combined DNA/RNA Molecule: Synthetic oligonucleotide"
  source: /note="DNA/RNA"
  source: /note="5' tri-ethylene glycol (TEG)"
  modified_base (11)..(11): 5-methyl modified nucleotide
  modified_base (13)..(13): bicyclic nucleic acid (BNA)
  modified_base (14)..(14): bicyclic nucleic acid (BNA)
aggaagauggcatt

SEQ ID NO: 19647 - DNA, 13 bp, Artificial Sequence
  source: /note="Description of Artificial Sequence: Synthetic oligonucleotide"
  source: /note="Description of Combined DNA/RNA Molecule: Synthetic oligonucleotide"
  source: /note="DNA/RNA"
  source: /note="5' tri-ethylene glycol (TEG)"
  modified_base (11)..(11): 5-methyl modified nucleotide
  modified_base (12)..(12): bicyclic nucleic acid (BNA)
  modified_base (13)..(13): bicyclic nucleic acid (BNA)
aggaagauggcat

SEQ ID NO: 19648 - RNA, 12 nt, Artificial Sequence
  source: /note="Description of Artificial Sequence: Synthetic oligonucleotide"
  source: /note="RNA"
  source: /note="5' tri-ethylene glycol (TEG)"
  modified_base (11)..(11): 5-methyl bicyclic nucleic acid
  modified_base (12)..(12): bicyclic nucleic acid (BNA)
aggaagauggca

SEQ ID NO: 19649 - RNA, 10 nt, Artificial Sequence
  source: /note="Description of Artificial Sequence: Synthetic oligonucleotide"
  source: /note="RNA"
  source: /note="5' tri-ethylene glycol (TEG)"
  modified_base (9)..(9): bicyclic nucleic acid (BNA)
  modified_base (10)..(10): bicyclic nucleic acid (BNA)
aggaagaugg

SEQ ID NO: 19650 - DNA, 9 bp, Artificial Sequence
  source: /note="Description of Artificial Sequence: Synthetic oligonucleotide"
  source: /note="DNA/RNA"
  source: /note="5' tri-ethylene glycol (TEG)"
  modified_base (8)..(8): bicyclic nucleic acid (BNA)
  modified_base (9)..(9): bicyclic nucleic acid (BNA)
aggaagatg

SEQ ID NO: 19651 - DNA, 8 bp, Artificial Sequence
  source: /note="Description of Artificial Sequence: Synthetic oligonucleotide"
  source: /note="DNA/RNA"
  source: /note="5' tri-ethylene glycol (TEG)"
  modified_base (7)..(7): bicyclic nucleic acid (BNA)
  modified_base (8)..(8): bicyclic nucleic acid (BNA)
aggaagat

SEQ ID NO: 19652 - RNA, 18 nt, Artificial Sequence
  source: /note="Description of Artificial Sequence: Synthetic oligonucleotide"
  source: /note="RNA"
  source: /note="5' tri-ethylene glycol (TEG)"
  modified_base (10)..(10): 5-methyl modified nucleotide
  modified_base (15)..(15): 5-methyl modified nucleotide
  modified_base (17)..(17): bicyclic nucleic acid (BNA)
  modified_base (18)..(18): bicyclic nucleic acid (BNA)
ggaagauggcauuucuag

SEQ ID NO: 19653 - DNA, 17 bp, Artificial Sequence
  source: /note="Description of Artificial Sequence: Synthetic oligonucleotide"
  source: /note="Description of Combined DNA/RNA Molecule: Synthetic oligonucleotide"
  source: /note="DNA/RNA"
  source: /note="5' tri-ethylene glycol (TEG)"
  modified_base (10)..(10): 5-methyl modified nucleotide
  modified_base (15)..(15): 5-methyl modified nucleotide
  modified_base (16)..(16): bicyclic nucleic acid (BNA)
  modified_base (17)..(17): bicyclic nucleic acid (BNA)
ggaagauggcauuucta

SEQ ID NO: 19654 - DNA, 16 bp, Artificial Sequence
  source: /note="Description of Artificial Sequence: Synthetic oligonucleotide"
  source: /note="Description of Combined DNA/RNA Molecule: Synthetic oligonucleotide"
  source: /note="DNA/RNA"
  source: /note="5' tri-ethylene glycol (TEG)"
  modified_base (10)..(10): 5-methyl modified nucleotide
  modified_base (15)..(15): 5-methyl bicyclic nucleic acid
  modified_base (16)..(16): bicyclic nucleic acid (BNA)
ggaagauggcauuuct

SEQ ID NO: 19655 - DNA, 15 bp, Artificial Sequence
  source: /note="Description of Artificial Sequence: Synthetic oligonucleotide"
  source: /note="Description of Combined DNA/RNA Molecule: Synthetic oligonucleotide"
  source: /note="DNA/RNA"
  source: /note="5' tri-ethylene glycol (TEG)"
  modified_base (10)..(10): 5-methyl modified nucleotide
  modified_base (14)..(14): bicyclic nucleic acid (BNA)
  modified_base (15)..(15): 5-methyl bicyclic nucleic acid
ggaagauggcauutc

SEQ ID NO: 19656 - DNA, 14 bp, Artificial Sequence
  source: /note="Description of Artificial Sequence: Synthetic oligonucleotide"
  source: /note="Description of Combined DNA/RNA Molecule: Synthetic oligonucleotide"
  source: /note="DNA/RNA"
  source: /note="5' tri-ethylene glycol (TEG)"
  modified_base (10)..(10): 5-methyl modified nucleotide
  modified_base (13)..(13): bicyclic nucleic acid (BNA)
  modified_base (14)..(14): bicyclic nucleic acid (BNA)
ggaagauggcautt

SEQ ID NO: 19657 - DNA, 13 bp, Artificial Sequence
  source: /note="Description of Artificial Sequence: Synthetic oligonucleotide"
  source: /note="Description of Combined DNA/RNA Molecule: Synthetic oligonucleotide"
  source: /note="DNA/RNA"
  source: /note="5' tri-ethylene glycol (TEG)"
  modified_base (10)..(10): 5-methyl modified nucleotide
  modified_base (12)..(12): bicyclic nucleic acid (BNA)
  modified_base (13)..(13): bicyclic nucleic acid (BNA)
ggaagauggcatt

SEQ ID NO: 19658 - DNA, 12 bp, Artificial Sequence
  source: /note="Description of Artificial Sequence: Synthetic oligonucleotide"
  source: /note="Description of Combined DNA/RNA Molecule: Synthetic oligonucleotide"
  source: /note="DNA/RNA"
  source: /note="5' tri-ethylene glycol (TEG)"
  modified_base (10)..(10): 5-methyl modified nucleotide
  modified_base (11)..(11): bicyclic nucleic acid (BNA)
  modified_base (12)..(12): bicyclic nucleic acid (BNA)
ggaagauggcat

SEQ ID NO: 19659 - RNA, 11 nt, Artificial Sequence
  source: /note="Description of Artificial Sequence: Synthetic oligonucleotide"
  source: /note="RNA"
  source: /note="5' tri-ethylene glycol (TEG)"
  modified_base (10)..(10): 5-methyl bicyclic nucleic acid
  modified_base (11)..(11): bicyclic nucleic acid (BNA)
ggaagauggca

SEQ ID NO: 19660 - RNA, 10 nt, Artificial Sequence
  source: /note="Description of Artificial Sequence: Synthetic oligonucleotide"
  source: /note="RNA"
  source: /note="5' tri-ethylene glycol (TEG)"
  modified_base (9)..(9): bicyclic nucleic acid (BNA)
  modified_base (10)..(10): 5-methyl bicyclic nucleic acid
ggaagauggc

SEQ ID NO: 19661 - DNA, 8 bp, Artificial Sequence
  source: /note="Description of Artificial Sequence: Synthetic oligonucleotide"
  source: /note="DNA/RNA"
  source: /note="5' tri-ethylene glycol (TEG)"
  modified_base (7)..(7): bicyclic nucleic acid (BNA)
  modified_base (8)..(8): bicyclic nucleic acid (BNA)
ggaagatg

SEQ ID NO: 19662 - RNA, 17 nt, Artificial Sequence
  source: /note="Description of Artificial Sequence: Synthetic oligonucleotide"
  source: /note="RNA"
  source: /note="5' tri-ethylene glycol (TEG)"
  modified_base (9)..(9): 5-methyl modified nucleotide
  modified_base (14)..(14): 5-methyl modified nucleotide
  modified_base (16)..(16): bicyclic nucleic acid (BNA)
  modified_base (17)..(17): bicyclic nucleic acid (BNA)
gaagauggcauuucuag

SEQ ID NO: 19663 - DNA, 16 bp, Artificial Sequence
  source: /note="Description of Artificial Sequence: Synthetic oligonucleotide"
  source: /note="Description of Combined DNA/RNA Molecule: Synthetic oligonucleotide"
  source: /note="DNA/RNA"
  source: /note="5' tri-ethylene glycol (TEG)"
  modified_base (9)..(9): 5-methyl modified nucleotide
  modified_base (14)..(14): 5-methyl modified nucleotide
  modified_base (15)..(15): bicyclic nucleic acid (BNA)
  modified_base (16)..(16): bicyclic nucleic acid (BNA)
gaagauggcauuucta

SEQ ID NO: 19664 - DNA, 14 bp, Artificial Sequence
  source: /note="Description of Artificial Sequence: Synthetic oligonucleotide"
  source: /note="Description of Combined DNA/RNA Molecule: Synthetic oligonucleotide"
  source: /note="DNA/RNA"
  source: /note="5' tri-ethylene glycol (TEG)"
  modified_base (9)..(9): 5-methyl modified nucleotide
  modified_base (13)..(13): bicyclic nucleic acid (BNA)
  modified_base (14)..(14): 5-methyl bicyclic nucleic acid
gaagauggcauutc

SEQ ID NO: 19665 - DNA, 13 bp, Artificial Sequence
  source: /note="Description of Artificial Sequence: Synthetic oligonucleotide"
  source: /note="Description of Combined DNA/RNA Molecule: Synthetic oligonucleotide"
  source: /note="DNA/RNA"
  source: /note="5' tri-ethylene glycol (TEG)"
  modified_base (9)..(9): 5-methyl modified nucleotide
  modified_base (12)..(12): bicyclic nucleic acid (BNA)
  modified_base (13)..(13): bicyclic nucleic acid (BNA)
gaagauggcautt

SEQ ID NO: 19666 - DNA, 12 bp, Artificial Sequence
  source: /note="Description of Artificial Sequence: Synthetic oligonucleotide"
  source: /note="Description of Combined DNA/RNA Molecule: Synthetic oligonucleotide"
  source: /note="DNA/RNA"
  source: /note="5' tri-ethylene glycol (TEG)"
  modified_base (9)..(9): 5-methyl modified nucleotide
  modified_base (11)..(11): bicyclic nucleic acid (BNA)
  modified_base (12)..(12): bicyclic nucleic acid (BNA)
gaagauggcatt

SEQ ID NO: 19667 - DNA, 11 bp, Artificial Sequence
  source: /note="Description of Artificial Sequence: Synthetic oligonucleotide"
  source: /note="Description of Combined DNA/RNA Molecule: Synthetic oligonucleotide"
  source: /note="DNA/RNA"
  source: /note="5' tri-ethylene glycol (TEG)"
  modified_base (9)..(9): 5-methyl modified nucleotide
  modified_base (10)..(10): bicyclic nucleic acid (BNA)
  modified_base (11)..(11): bicyclic nucleic acid (BNA)
gaagauggcat

SEQ ID NO: 19668 - RNA, 10 nt, Artificial Sequence
  source: /note="Description of Artificial Sequence: Synthetic oligonucleotide"
  source: /note="RNA"
  source: /note="5' tri-ethylene glycol (TEG)"
  modified_base (9)..(9): 5-methyl bicyclic nucleic acid
  modified_base (10)..(10): bicyclic nucleic acid (BNA)
gaagauggca

SEQ ID NO: 19669 - RNA, 9 nt, Artificial Sequence
  source: /note="Description of Artificial Sequence: Synthetic oligonucleotide"
  source: /note="RNA"
  source: /note="5' tri-ethylene glycol (TEG)"
  modified_base (8)..(8): bicyclic nucleic acid (BNA)
  modified_base (9)..(9): 5-methyl bicyclic nucleic acid
gaagauggc

SEQ ID NO: 19670 - RNA, 8 nt, Artificial Sequence
  source: /note="Description of Artificial Sequence: Synthetic oligonucleotide"
  source: /note="RNA"
  source: /note="5' tri-ethylene glycol (TEG)"
  modified_base (7)..(7): bicyclic nucleic acid (BNA)
  modified_base (8)..(8): bicyclic nucleic acid (BNA)
gaagaugg

SEQ ID NO: 19671 - RNA, 16 nt, Artificial Sequence
  source: /note="Description of Artificial Sequence: Synthetic oligonucleotide"
  source: /note="RNA"
  source: /note="5' tri-ethylene glycol (TEG)"
  modified_base (8)..(8): 5-methyl modified nucleotide
  modified_base (13)..(13): 5-methyl modified nucleotide
  modified_base (15)..(15): bicyclic nucleic acid (BNA)
  modified_base (16)..(16): bicyclic nucleic acid (BNA)
aagauggcauuucuag

SEQ ID NO: 19672 - DNA, 15 bp, Artificial Sequence
  source: /note="Description of Artificial Sequence: Synthetic oligonucleotide"
  source: /note="Description of Combined DNA/RNA Molecule: Synthetic oligonucleotide"
  source: /note="DNA/RNA"
  source: /note="5' tri-ethylene glycol (TEG)"
  modified_base (8)..(8): 5-methyl modified nucleotide
  modified_base (13)..(13): 5-methyl modified nucleotide
  modified_base (14)..(14): bicyclic nucleic acid (BNA)
  modified_base (15)..(15): bicyclic nucleic acid (BNA)
aagauggcauuucta

SEQ ID NO: 19673 - DNA, 14 bp, Artificial Sequence
  source: /note="Description of Artificial Sequence: Synthetic oligonucleotide"
  source: /note="Description of Combined DNA/RNA Molecule: Synthetic oligonucleotide"
  source: /note="DNA/RNA"
  source: /note="5' tri-ethylene glycol (TEG)"
  modified_base (8)..(8): 5-methyl modified nucleotide
  modified_base (13)..(13): 5-methyl bicyclic nucleic acid
  modified_base (14)..(14): bicyclic nucleic acid (BNA)
aagauggcauuuct

SEQ ID NO: 19674 - DNA, 13 bp, Artificial Sequence
  source: /note="Description of Artificial Sequence: Synthetic oligonucleotide"
  source: /note="Description of Combined DNA/RNA Molecule: Synthetic oligonucleotide"
  source: /note="DNA/RNA"
  source: /note="5' tri-ethylene glycol (TEG)"
  modified_base (8)..(8): 5-methyl modified nucleotide
  modified_base (12)..(12): bicyclic nucleic acid (BNA)
  modified_base (13)..(13): 5-methyl bicyclic nucleic acid
aagauggcauutc

SEQ ID NO: 19675 - DNA, 12 bp, Artificial Sequence
  source: /note="Description of Artificial Sequence: Synthetic oligonucleotide"
  source: /note="Description of Combined DNA/RNA Molecule: Synthetic oligonucleotide"
  source: /note="DNA/RNA"
  source: /note="5' tri-ethylene glycol (TEG)"
  modified_base (8)..(8): 5-methyl modified nucleotide
  modified_base (11)..(11): bicyclic nucleic acid (BNA)
  modified_base (12)..(12): bicyclic nucleic acid (BNA)
aagauggcautt

SEQ ID NO: 19676 - DNA, 11 bp, Artificial Sequence
  source: /note="Description of Artificial Sequence: Synthetic oligonucleotide"
  source: /note="Description of Combined DNA/RNA Molecule: Synthetic oligonucleotide"
  source: /note="DNA/RNA"
  source: /note="5' tri-ethylene glycol (TEG)"
  modified_base (8)..(8): 5-methyl modified nucleotide
  modified_base (10)..(10): bicyclic nucleic acid (BNA)
  modified_base (11)..(11): bicyclic nucleic acid (BNA)
aagauggcatt

SEQ ID NO: 19677 - DNA, 10 bp, Artificial Sequence
  source: /note="Description of Artificial Sequence: Synthetic oligonucleotide"
  source: /note="Description of Combined DNA/RNA Molecule: Synthetic oligonucleotide"
  source: /note="DNA/RNA"
  source: /note="5' tri-ethylene glycol (TEG)"
  modified_base (8)..(8): 5-methyl modified nucleotide
  modified_base (9)..(9): bicyclic nucleic acid (BNA)
  modified_base (10)..(10): bicyclic nucleic acid (BNA)
aagauggcat

SEQ ID NO: 19678 - RNA, 9 nt, Artificial Sequence
  source: /note="Description of Artificial Sequence: Synthetic oligonucleotide"
  source: /note="RNA"
  source: /note="5' tri-ethylene glycol (TEG)"
  modified_base (8)..(8): 5-methyl bicyclic nucleic acid
  modified_base (9)..(9): bicyclic nucleic acid (BNA)
aagauggca

SEQ ID NO: 19679 - RNA, 8 nt, Artificial Sequence
  source: /note="Description of Artificial Sequence: Synthetic oligonucleotide"
  source: /note="RNA"
  source: /note="5' tri-ethylene glycol (TEG)"
  modified_base (7)..(7): bicyclic nucleic acid (BNA)
  modified_base (8)..(8): 5-methyl bicyclic nucleic acid
aagauggc

SEQ ID NO: 19680 - RNA, 15 nt, Artificial Sequence
  source: /note="Description of Artificial Sequence: Synthetic oligonucleotide"
  source: /note="RNA"
  source: /note="5' tri-ethylene glycol (TEG)"
  modified_base (7)..(7): 5-methyl modified nucleotide
  modified_base (12)..(12): 5-methyl modified nucleotide
  modified_base (14)..(14): bicyclic nucleic acid (BNA)
  modified_base (15)..(15): bicyclic nucleic acid (BNA)
agauggcauuucuag

SEQ ID NO: 19681 - DNA, 14 bp, Artificial Sequence
  source: /note="Description of Artificial Sequence: Synthetic oligonucleotide"
  source: /note="Description of Combined DNA/RNA Molecule: Synthetic oligonucleotide"
  source: /note="DNA/RNA"
  source: /note="5' tri-ethylene glycol (TEG)"
  modified_base (7)..(7): 5-methyl modified nucleotide
  modified_base (12)..(12): 5-methyl modified nucleotide
  modified_base (13)..(13): bicyclic nucleic acid (BNA)
  modified_base (14)..(14): bicyclic nucleic acid (BNA)
agauggcauuucta

SEQ ID NO: 19682 - DNA, 13 bp, Artificial Sequence
  source: /note="Description of Artificial Sequence: Synthetic oligonucleotide"
  source: /note="Description of Combined DNA/RNA Molecule: Synthetic oligonucleotide"
  source: /note="DNA/RNA"
  source: /note="5' tri-ethylene glycol (TEG)"
  modified_base (7)..(7): 5-methyl modified nucleotide
  modified_base (12)..(12): 5-methyl bicyclic nucleic acid
  modified_base (13)..(13): bicyclic nucleic acid (BNA)
agauggcauuuct

SEQ ID NO: 19683 - DNA, 12 bp, Artificial Sequence
  source: /note="Description of Artificial Sequence: Synthetic oligonucleotide"
  source: /note="Description of Combined DNA/RNA Molecule: Synthetic oligonucleotide"
  source: /note="DNA/RNA"
  source: /note="5' tri-ethylene glycol (TEG)"
  modified_base (7)..(7): 5-methyl modified nucleotide
  modified_base (11)..(11): bicyclic nucleic acid (BNA)
  modified_base (12)..(12): 5-methyl bicyclic nucleic acid
agauggcauutc

SEQ ID NO: 19684 - DNA, 11 bp, Artificial Sequence
  source: /note="Description of Artificial Sequence: Synthetic oligonucleotide"
  source: /note="Description of Combined DNA/RNA Molecule: Synthetic oligonucleotide"
  source: /note="DNA/RNA"
  source: /note="5' tri-ethylene glycol (TEG)"
  modified_base (7)..(7): 5-methyl modified nucleotide
  modified_base (10)..(10): bicyclic nucleic acid (BNA)
  modified_base (11)..(11): bicyclic nucleic acid (BNA)
agauggcautt

SEQ ID NO: 19685 - DNA, 10 bp, Artificial Sequence
  source: /note="Description of Artificial Sequence: Synthetic oligonucleotide"
  source: /note="Description of Combined DNA/RNA Molecule: Synthetic oligonucleotide"
  source: /note="DNA/RNA"
  source: /note="5' tri-ethylene glycol (TEG)"
  modified_base (7)..(7): 5-methyl modified nucleotide
  modified_base (9)..(9): bicyclic nucleic acid (BNA)
  modified_base (10)..(10): bicyclic nucleic acid (BNA)
agauggcatt

SEQ ID NO: 19686 - DNA, 9 bp, Artificial Sequence
  source: /note="Description of Artificial Sequence: Synthetic oligonucleotide"
  source: /note="Description of Combined DNA/RNA Molecule: Synthetic oligonucleotide"
  source: /note="DNA/RNA"
  source: /note="5' tri-ethylene glycol (TEG)"
  modified_base (7)..(7): 5-methyl modified nucleotide
  modified_base (8)..(8): bicyclic nucleic acid (BNA)
  modified_base (9)..(9): bicyclic nucleic acid (BNA)
agauggcat

SEQ ID NO: 19687 - RNA, 8 nt, Artificial Sequence
  source: /note="Description of Artificial Sequence: Synthetic oligonucleotide"
  source: /note="RNA"
  source: /note="5' tri-ethylene glycol (TEG)"
  modified_base (7)..(7): 5-methyl bicyclic nucleic acid
  modified_base (8)..(8): bicyclic nucleic acid (BNA)
agauggca

SEQ ID NO: 19688 - RNA, 30 nt, Artificial Sequence; identical to SEQ ID NO: 284
  source: /note="Description of Artificial Sequence: Synthetic oligonucleotide"
  source: /note="RNA"
  source: /note="5' tri-ethylene glycol (TEG)"
  modified_base (1)..(1): 5-methyl modified nucleotide
  modified_base (3)..(3): 5-methyl modified nucleotide
  modified_base (4)..(4): 5-methyl modified nucleotide
  modified_base (7)..(7): 5-methyl modified nucleotide
  modified_base (10)..(10): 5-methyl modified nucleotide
  modified_base (22)..(22): 5-methyl modified nucleotide
  modified_base (27)..(27): 5-methyl modified nucleotide
  modified_base (29)..(29): bicyclic nucleic acid (BNA)
  modified_base (30)..(30): bicyclic nucleic acid (BNA)

SEQ ID NO: 19689 - DNA, 29 bp, Artificial Sequence
  source: /note="Description of Artificial Sequence: Synthetic oligonucleotide"
  source: /note="Description of Combined DNA/RNA Molecule: Synthetic oligonucleotide"
  source: /note="DNA/RNA"
  source: /note="5' tri-ethylene glycol (TEG)"
  modified_base (1)..(1): 5-methyl modified nucleotide
  modified_base (3)..(3): 5-methyl modified nucleotide
  modified_base (4)..(4): 5-methyl modified nucleotide
  modified_base (7)..(7): 5-methyl modified nucleotide
  modified_base (10)..(10): 5-methyl modified nucleotide
  modified_base (22)..(22): 5-methyl modified nucleotide
  modified_base (27)..(27): 5-methyl modified nucleotide
  modified_base (28)..(28): bicyclic nucleic acid (BNA)
  modified_base (29)..(29): bicyclic nucleic acid (BNA)
cuccaacaucaaggaagauggcauuucta

SEQ ID NO: 19690 - DNA, 28 bp, Artificial Sequence
  source: /note="Description of Artificial Sequence: Synthetic oligonucleotide"
  source: /note="Description of Combined DNA/RNA Molecule: Synthetic oligonucleotide"
  source: /note="DNA/RNA"
  source: /note="5' tri-ethylene glycol (TEG)"
  modified_base (1)..(1): 5-methyl modified nucleotide
  modified_base (3)..(3): 5-methyl modified nucleotide
  modified_base (4)..(4): 5-methyl modified nucleotide
  modified_base (7)..(7): 5-methyl modified nucleotide
  modified_base (10)..(10): 5-methyl modified nucleotide
  modified_base (22)..(22): 5-methyl modified nucleotide
  modified_base (27)..(27): 5-methyl bicyclic nucleic acid
  modified_base (28)..(28): bicyclic nucleic acid (BNA)
cuccaacaucaaggaagauggcauuuct

SEQ ID NO: 19691 - DNA, 27 bp, Artificial Sequence
  source: /note="Description of Artificial Sequence: Synthetic oligonucleotide"
  source: /note="Description of Combined DNA/RNA Molecule: Synthetic oligonucleotide"
  source: /note="DNA/RNA"
  source: /note="5' tri-ethylene glycol (TEG)"
  modified_base (1)..(1): 5-methyl modified nucleotide
  modified_base (3)..(3): 5-methyl modified nucleotide
  modified_base (4)..(4): 5-methyl modified nucleotide
  modified_base (7)..(7): 5-methyl modified nucleotide
  modified_base (10)..(10): 5-methyl modified nucleotide
  modified_base (22)..(22): 5-methyl modified nucleotide
  modified_base (26)..(26): bicyclic nucleic acid (BNA)
  modified_base (27)..(27): 5-methyl bicyclic nucleic acid
cuccaacaucaaggaagauggcauutc

SEQ ID NO: 19692 - DNA, 26 bp, Artificial Sequence
  source: /note="Description of Artificial Sequence: Synthetic oligonucleotide"
  source: /note="Description of Combined DNA/RNA Molecule: Synthetic oligonucleotide"
  source: /note="DNA/RNA"
  source: /note="5' tri-ethylene glycol (TEG)"
  modified_base (1)..(1): 5-methyl modified nucleotide
  modified_base (3)..(3): 5-methyl modified nucleotide
  modified_base (4)..(4): 5-methyl modified nucleotide
  modified_base (7)..(7): 5-methyl modified nucleotide
  modified_base (10)..(10): 5-methyl modified nucleotide
  modified_base (22)..(22): 5-methyl modified nucleotide
  modified_base (25)..(25): bicyclic nucleic acid (BNA)
  modified_base (26)..(26): bicyclic nucleic acid (BNA)
cuccaacaucaaggaagauggcautt

SEQ ID NO: 19693 - DNA, 25 bp, Artificial Sequence
  source: /note="Description of Artificial Sequence: Synthetic oligonucleotide"
  source: /note="Description of Combined DNA/RNA Molecule: Synthetic oligonucleotide"
  source: /note="DNA/RNA"
  source: /note="5' tri-ethylene glycol (TEG)"
  modified_base (1)..(1): 5-methyl modified nucleotide
  modified_base (3)..(3): 5-methyl modified nucleotide
  modified_base (4)..(4): 5-methyl modified nucleotide
  modified_base (7)..(7): 5-methyl modified nucleotide
  modified_base (10)..(10): 5-methyl modified nucleotide
  modified_base (22)..(22): 5-methyl modified nucleotide
  modified_base (24)..(24): bicyclic nucleic acid (BNA)
  modified_base (25)..(25): bicyclic nucleic acid (BNA)
cuccaacaucaaggaagauggcatt

SEQ ID NO: 19694 - DNA, 24 bp, Artificial Sequence
  source: /note="Description of Artificial Sequence: Synthetic oligonucleotide"
  source: /note="Description of Combined DNA/RNA Molecule: Synthetic oligonucleotide"
  source: /note="DNA/RNA"
  source: /note="5' tri-ethylene glycol (TEG)"
  modified_base (1)..(1): 5-methyl modified nucleotide
  modified_base (3)..(3): 5-methyl modified nucleotide
  modified_base (4)..(4): 5-methyl modified nucleotide
  modified_base (7)..(7): 5-methyl modified nucleotide
  modified_base (10)..(10): 5-methyl modified nucleotide
  modified_base (22)..(22): 5-methyl modified nucleotide
  modified_base (23)..(23): bicyclic nucleic acid (BNA)
  modified_base (24)..(24): bicyclic nucleic acid (BNA)
cuccaacaucaaggaagauggcat

SEQ ID NO: 19695 - RNA, 23 nt, Artificial Sequence
  source: /note="Description of Artificial Sequence: Synthetic oligonucleotide"
  source: /note="RNA"
  source: /note="5' tri-ethylene glycol (TEG)"
  modified_base (1)..(1): 5-methyl modified nucleotide
  modified_base (3)..(3): 5-methyl modified nucleotide
  modified_base (4)..(4): 5-methyl modified nucleotide
  modified_base (7)..(7): 5-methyl modified nucleotide
  modified_base (10)..(10): 5-methyl modified nucleotide
  modified_base (22)..(22): 5-methyl bicyclic nucleic acid
  modified_base (23)..(23): bicyclic nucleic acid (BNA)
cuccaacaucaaggaagauggca

SEQ ID NO: 19696 - RNA, 22 nt, Artificial Sequence
  source: /note="Description of Artificial Sequence: Synthetic oligonucleotide"
  source: /note="RNA"
  source: /note="5' tri-ethylene glycol (TEG)"
  modified_base (1)..(1): 5-methyl modified nucleotide
  modified_base (3)..(3): 5-methyl modified nucleotide
  modified_base (4)..(4): 5-methyl modified nucleotide
  modified_base (7)..(7): 5-methyl modified nucleotide
  modified_base (10)..(10): 5-methyl modified nucleotide
  modified_base (21)..(21): bicyclic nucleic acid (BNA)
  modified_base (22)..(22): 5-methyl bicyclic nucleic acid
cuccaacaucaaggaagauggc

SEQ ID NO: 19697 - RNA, 21 nt, Artificial Sequence
  source: /note="Description of Artificial Sequence: Synthetic oligonucleotide"
  source: /note="RNA"
  source: /note="5' tri-ethylene glycol (TEG)"
  modified_base (1)..(1): 5-methyl modified nucleotide
  modified_base (3)..(3): 5-methyl modified nucleotide
  modified_base (4)..(4): 5-methyl modified nucleotide
  modified_base (7)..(7): 5-methyl modified nucleotide
  modified_base (10)..(10): 5-methyl modified nucleotide
  modified_base (20)..(20): bicyclic nucleic acid (BNA)
  modified_base (21)..(21): bicyclic nucleic acid (BNA)
cuccaacaucaaggaagaugg

SEQ ID NO: 19698 - DNA, 20 bp, Artificial Sequence
  source: /note="Description of Artificial Sequence: Synthetic oligonucleotide"
  source: /note="Description of Combined DNA/RNA Molecule: Synthetic oligonucleotide"
  source: /note="DNA/RNA"
  source: /note="5' tri-ethylene glycol (TEG)"
  modified_base (1)..(1): 5-methyl modified nucleotide
  modified_base (3)..(3): 5-methyl modified nucleotide
  modified_base (4)..(4): 5-methyl modified nucleotide
  modified_base (7)..(7): 5-methyl modified nucleotide
  modified_base (10)..(10): 5-methyl modified nucleotide
  modified_base (19)..(19): bicyclic nucleic acid (BNA)
  modified_base (20)..(20): bicyclic nucleic acid (BNA)
cuccaacaucaaggaagatg

SEQ ID NO: 19699 - DNA, 19 bp, Artificial Sequence
  source: /note="Description of Artificial Sequence: Synthetic oligonucleotide"
  source: /note="Description of Combined DNA/RNA Molecule: Synthetic oligonucleotide"
  source: /note="DNA/RNA"
  source: /note="5' tri-ethylene glycol (TEG)"
  modified_base (1)..(1): 5-methyl modified nucleotide
  modified_base (3)..(3): 5-methyl modified nucleotide
  modified_base (4)..(4): 5-methyl modified nucleotide
  modified_base (7)..(7): 5-methyl modified nucleotide
  modified_base (10)..(10): 5-methyl modified nucleotide
  modified_base (18)..(18): bicyclic nucleic acid (BNA)
  modified_base (19)..(19): bicyclic nucleic acid (BNA)
cuccaacaucaaggaagat

SEQ ID NO: 19700 - RNA, 18 nt, Artificial Sequence
  source: /note="Description of Artificial Sequence: Synthetic oligonucleotide"
  source: /note="RNA"
  source: /note="5' tri-ethylene glycol (TEG)"
  modified_base (1)..(1): 5-methyl modified nucleotide
  modified_base (3)..(3): 5-methyl modified nucleotide
  modified_base (4)..(4): 5-methyl modified nucleotide
  modified_base (7)..(7): 5-methyl modified nucleotide
  modified_base (10)..(10): 5-methyl modified nucleotide
  modified_base (17)..(17): bicyclic nucleic acid (BNA)
  modified_base (18)..(18): bicyclic nucleic acid (BNA)
cuccaacaucaaggaaga

SEQ ID NO: 19701 - RNA, 17 nt, Artificial Sequence
  source: /note="Description of Artificial Sequence: Synthetic oligonucleotide"
  source: /note="RNA"
  source: /note="5' tri-ethylene glycol (TEG)"
  modified_base (1)..(1): 5-methyl modified nucleotide
  modified_base (3)..(3): 5-methyl modified nucleotide
  modified_base (4)..(4): 5-methyl modified nucleotide
  modified_base (7)..(7): 5-methyl modified nucleotide
  modified_base (10)..(10): 5-methyl modified nucleotide
  modified_base (16)..(16): bicyclic nucleic acid (BNA)
  modified_base (17)..(17): bicyclic nucleic acid (BNA)
cuccaacaucaaggaag

SEQ ID NO: 19702 - RNA, 29 nt, Artificial Sequence
  source: /note="Description of Artificial Sequence: Synthetic oligonucleotide"
  source: /note="RNA"
  source: /note="5' tri-ethylene glycol (TEG)"
  modified_base (2)..(2): 5-methyl modified nucleotide
  modified_base (3)..(3): 5-methyl modified nucleotide
  modified_base (6)..(6): 5-methyl modified nucleotide
  modified_base (9)..(9): 5-methyl modified nucleotide
  modified_base (21)..(21): 5-methyl modified nucleotide
  modified_base (26)..(26): 5-methyl modified nucleotide
  modified_base (28)..(28): bicyclic nucleic acid (BNA)
  modified_base (29)..(29): bicyclic nucleic acid (BNA)
uccaacaucaaggaagauggcauuucuag

SEQ ID NO: 19703 - DNA, 28 bp, Artificial Sequence
  source: /note="Description of Artificial Sequence: Synthetic oligonucleotide"
  source: /note="Description of Combined DNA/RNA Molecule: Synthetic oligonucleotide"
  source: /note="DNA/RNA"
  source: /note="5' tri-ethylene glycol (TEG)"
  modified_base (2)..(2): 5-methyl modified nucleotide
  modified_base (3)..(3): 5-methyl modified nucleotide
  modified_base (6)..(6): 5-methyl modified nucleotide
  modified_base (9)..(9): 5-methyl modified nucleotide
  modified_base (21)..(21): 5-methyl modified nucleotide
  modified_base (26)..(26): 5-methyl modified nucleotide
  modified_base (27)..(27): bicyclic nucleic acid (BNA)
  modified_base (28)..(28): bicyclic nucleic acid (BNA)
uccaacaucaaggaagauggcauuucta

SEQ ID NO: 19704 - DNA, 27 bp, Artificial Sequence
  source: /note="Description of Artificial Sequence: Synthetic oligonucleotide"
  source: /note="Description of Combined DNA/RNA Molecule: Synthetic oligonucleotide"
  source: /note="DNA/RNA"
  source: /note="5' tri-ethylene glycol (TEG)"
  modified_base (2)..(2): 5-methyl modified nucleotide
  modified_base (3)..(3): 5-methyl modified nucleotide
  modified_base (6)..(6): 5-methyl modified nucleotide
  modified_base (9)..(9): 5-methyl modified nucleotide
  modified_base (21)..(21): 5-methyl modified nucleotide
  modified_base (26)..(26): 5-methyl bicyclic nucleic acid
  modified_base (27)..(27): bicyclic nucleic acid (BNA)
uccaacaucaaggaagauggcauuuct

SEQ ID NO: 19705 - DNA, 26 bp, Artificial Sequence
  source: /note="Description of Artificial Sequence: Synthetic oligonucleotide"
  source: /note="Description of Combined DNA/RNA Molecule: Synthetic oligonucleotide"
  source: /note="DNA/RNA"
  source: /note="5' tri-ethylene glycol (TEG)"
  modified_base (2)..(2): 5-methyl modified nucleotide
  modified_base (3)..(3): 5-methyl modified nucleotide
  modified_base (6)..(6): 5-methyl modified nucleotide
  modified_base (9)..(9): 5-methyl modified nucleotide
  modified_base (21)..(21): 5-methyl modified nucleotide
  modified_base (25)..(25): bicyclic nucleic acid (BNA)
  modified_base (26)..(26): 5-methyl bicyclic nucleic acid
uccaacaucaaggaagauggcauutc

SEQ ID NO: 19706 - DNA, 25 bp, Artificial Sequence
  source: /note="Description of Artificial Sequence: Synthetic oligonucleotide"
  source: /note="Description of Combined DNA/RNA Molecule: Synthetic oligonucleotide"
  source: /note="DNA/RNA"
  source: /note="5' tri-ethylene glycol (TEG)"
  modified_base (2)..(2): 5-methyl modified nucleotide
  modified_base (3)..(3): 5-methyl modified nucleotide
  modified_base (6)..(6): 5-methyl modified nucleotide
  modified_base (9)..(9): 5-methyl modified nucleotide
  modified_base (21)..(21): 5-methyl modified nucleotide
  modified_base (24)..(24): bicyclic nucleic acid (BNA)
  modified_base (25)..(25): bicyclic nucleic acid (BNA)
uccaacaucaaggaagauggcautt

SEQ ID NO: 19707 - DNA, 24 bp, Artificial Sequence
  source: /note="Description of Artificial Sequence: Synthetic oligonucleotide"
  source: /note="Description of Combined DNA/RNA Molecule: Synthetic oligonucleotide"
  source: /note="DNA/RNA"
  source: /note="5' tri-ethylene glycol (TEG)"
  modified_base (2)..(2): 5-methyl modified nucleotide
  modified_base (3)..(3): 5-methyl modified nucleotide
  modified_base (6)..(6): 5-methyl modified nucleotide
  modified_base (9)..(9): 5-methyl modified nucleotide
  modified_base (21)..(21): 5-methyl modified nucleotide
  modified_base (23)..(23): bicyclic nucleic acid (BNA)
  modified_base (24)..(24): bicyclic nucleic acid (BNA)
uccaacaucaaggaagauggcatt

SEQ ID NO: 19708 - DNA, 23 bp, Artificial Sequence
  source: /note="Description of Artificial Sequence: Synthetic oligonucleotide"
  source: /note="Description of Combined DNA/RNA Molecule: Synthetic oligonucleotide"
  source: /note="DNA/RNA"
  source: /note="5' tri-ethylene glycol (TEG)"
  modified_base (2)..(2): 5-methyl modified nucleotide
  modified_base (3)..(3): 5-methyl modified nucleotide
  modified_base (6)..(6): 5-methyl modified nucleotide
  modified_base (9)..(9): 5-methyl modified nucleotide
  modified_base (21)..(21): 5-methyl modified nucleotide
  modified_base (22)..(22): bicyclic nucleic acid (BNA)
  modified_base (23)..(23): bicyclic nucleic acid (BNA)
uccaacaucaaggaagauggcat

SEQ ID NO: 19709 - RNA, 22 nt, Artificial Sequence
  source: /note="Description of Artificial Sequence: Synthetic oligonucleotide"
  source: /note="RNA"
  source: /note="5' tri-ethylene glycol (TEG)"
  modified_base (2)..(2): 5-methyl modified nucleotide
  modified_base (3)..(3): 5-methyl modified nucleotide
  modified_base (6)..(6): 5-methyl modified nucleotide
  modified_base (9)..(9): 5-methyl modified nucleotide
  modified_base (21)..(21): 5-methyl bicyclic nucleic acid
  modified_base (22)..(22): bicyclic nucleic acid (BNA)
uccaacaucaaggaagauggca

SEQ ID NO: 19710 - RNA, 21 nt, Artificial Sequence
  source: /note="Description of Artificial Sequence: Synthetic oligonucleotide"
  source: /note="RNA"
  source: /note="5' tri-ethylene glycol (TEG)"
  modified_base (2)..(2): 5-methyl modified nucleotide
  modified_base (3)..(3): 5-methyl modified nucleotide
  modified_base (6)..(6): 5-methyl modified nucleotide
  modified_base (9)..(9): 5-methyl modified nucleotide
  modified_base (20)..(20): bicyclic nucleic acid (BNA)
  modified_base (21)..(21): 5-methyl bicyclic nucleic acid
uccaacaucaaggaagauggc

SEQ ID NO: 19711 - RNA, 20 nt, Artificial Sequence
  source: /note="Description of Artificial Sequence: Synthetic oligonucleotide"
  source: /note="RNA"
  source: /note="5' tri-ethylene glycol (TEG)"
  modified_base (2)..(2): 5-methyl modified nucleotide
  modified_base (3)..(3): 5-methyl modified nucleotide
  modified_base (6)..(6): 5-methyl modified nucleotide
  modified_base (9)..(9): 5-methyl modified nucleotide
  modified_base (19)..(19): bicyclic nucleic acid (BNA)
  modified_base (20)..(20): bicyclic nucleic acid (BNA)
uccaacaucaaggaagaugg

SEQ ID NO: 19712 - DNA, 19 bp, Artificial Sequence
  source: /note="Description of Artificial Sequence: Synthetic oligonucleotide"
  source: /note="Description of Combined DNA/RNA Molecule: Synthetic oligonucleotide"
  source: /note="DNA/RNA"
  source: /note="5' tri-ethylene glycol (TEG)"
  modified_base (2)..(2): 5-methyl modified nucleotide
  modified_base (3)..(3): 5-methyl modified nucleotide
  modified_base (6)..(6): 5-methyl modified nucleotide
  modified_base (9)..(9): 5-methyl modified nucleotide
  modified_base (18)..(18): bicyclic nucleic acid (BNA)
  modified_base (19)..(19): bicyclic nucleic acid (BNA)
uccaacaucaaggaagatg

SEQ ID NO: 19713 - DNA, 18 bp, Artificial Sequence
  source: /note="Description of Artificial Sequence: Synthetic oligonucleotide"
  source: /note="Description of Combined DNA/RNA Molecule: Synthetic oligonucleotide"
  source: /note="DNA/RNA"
  source: /note="5' tri-ethylene glycol (TEG)"
  modified_base (2)..(2): 5-methyl modified nucleotide
  modified_base (3)..(3): 5-methyl modified nucleotide
  modified_base (6)..(6): 5-methyl modified nucleotide
  modified_base (9)..(9): 5-methyl modified nucleotide
  modified_base (17)..(17): bicyclic nucleic acid (BNA)
  modified_base (18)..(18): bicyclic nucleic acid (BNA)
uccaacaucaaggaagat

SEQ ID NO: 19714 - RNA, 17 nt, Artificial Sequence
  source: /note="Description of Artificial Sequence: Synthetic oligonucleotide"
  source: /note="RNA"
  source: /note="5' tri-ethylene glycol (TEG)"
  modified_base (2)..(2): 5-methyl modified nucleotide
  modified_base (3)..(3): 5-methyl modified nucleotide
  modified_base (6)..(6): 5-methyl modified nucleotide
  modified_base (9)..(9): 5-methyl modified nucleotide
  modified_base (16)..(16): bicyclic nucleic acid (BNA)
  modified_base (17)..(17): bicyclic nucleic acid (BNA)
uccaacaucaaggaaga

SEQ ID NO: 19715 - RNA, 16 nt, Artificial Sequence
  source: /note="Description of Artificial Sequence: Synthetic oligonucleotide"
  source: /note="RNA"
  source: /note="5' tri-ethylene glycol (TEG)"
  modified_base (2)..(2): 5-methyl modified nucleotide
  modified_base (3)..(3): 5-methyl modified nucleotide
  modified_base (6)..(6): 5-methyl modified nucleotide
  modified_base (9)..(9): 5-methyl modified nucleotide
  modified_base (15)..(15): bicyclic nucleic acid (BNA)
  modified_base (16)..(16): bicyclic nucleic acid (BNA)
uccaacaucaaggaag

SEQ ID NO: 19716 - RNA, 28 nt, Artificial Sequence
  source: /note="Description of Artificial Sequence: Synthetic oligonucleotide"
  source: /note="RNA"
  source: /note="5' tri-ethylene glycol (TEG)"
  modified_base (1)..(1): 5-methyl modified nucleotide
  modified_base (2)..(2): 5-methyl modified nucleotide
  modified_base (5)..(5): 5-methyl modified nucleotide
  modified_base (8)..(8): 5-methyl modified nucleotide
  modified_base (20)..(20): 5-methyl modified nucleotide
  modified_base (25)..(25): 5-methyl modified nucleotide
  modified_base (27)..(27): bicyclic nucleic acid (BNA)
  modified_base (28)..(28): bicyclic nucleic acid (BNA)
ccaacaucaaggaagauggcauuucuag

SEQ ID NO: 19717 - DNA, 27 bp, Artificial Sequence
  source: /note="Description of Artificial Sequence: Synthetic oligonucleotide"
  source: /note="Description of Combined DNA/RNA Molecule: Synthetic oligonucleotide"
  source: /note="DNA/RNA"
  source: /note="5' tri-ethylene glycol (TEG)"
  modified_base (1)..(1): 5-methyl modified nucleotide
  modified_base (2)..(2): 5-methyl modified nucleotide
  modified_base (5)..(5): 5-methyl modified nucleotide
  modified_base (8)..(8): 5-methyl modified nucleotide
  modified_base (20)..(20): 5-methyl modified nucleotide
  modified_base (25)..(25): 5-methyl modified nucleotide
  modified_base (26)..(26): bicyclic nucleic acid (BNA)
  modified_base (27)..(27): bicyclic nucleic acid (BNA)
ccaacaucaaggaagauggcauuucta

SEQ ID NO: 19718 - DNA, 26 bp, Artificial Sequence
  source: /note="Description of Artificial Sequence: Synthetic oligonucleotide"
  source: /note="Description of Combined DNA/RNA Molecule: Synthetic oligonucleotide"
  source: /note="DNA/RNA"
  source: /note="5' tri-ethylene glycol (TEG)"
  modified_base (1)..(1): 5-methyl modified nucleotide
  modified_base (2)..(2): 5-methyl modified nucleotide
  modified_base (5)..(5): 5-methyl modified nucleotide
  modified_base (8)..(8): 5-methyl modified nucleotide
  modified_base (20)..(20): 5-methyl modified nucleotide
  modified_base (25)..(25): 5-methyl bicyclic nucleic acid
  modified_base (26)..(26): bicyclic nucleic acid (BNA)
ccaacaucaaggaagauggcauuuct

SEQ ID NO: 19719 - DNA, 25 bp, Artificial Sequence
  source: /note="Description of Artificial Sequence: Synthetic oligonucleotide"
  source: /note="Description of Combined DNA/RNA Molecule: Synthetic oligonucleotide"
  source: /note="DNA/RNA"
  source: /note="5' tri-ethylene glycol (TEG)"
  modified_base (1)..(1): 5-methyl modified nucleotide
  modified_base (2)..(2): 5-methyl modified nucleotide
  modified_base (5)..(5): 5-methyl modified nucleotide
  modified_base (8)..(8): 5-methyl modified nucleotide
  modified_base (20)..(20): 5-methyl modified nucleotide
  modified_base (24)..(24): bicyclic nucleic acid (BNA)
  modified_base (25)..(25): 5-methyl bicyclic nucleic acid
ccaacaucaaggaagauggcauutc

SEQ ID NO: 19720 - DNA, 24 bp, Artificial Sequence
  source: /note="Description of Artificial Sequence: Synthetic oligonucleotide"
  source: /note="Description of Combined DNA/RNA Molecule: Synthetic oligonucleotide"
  source: /note="DNA/RNA"
  source: /note="5' tri-ethylene glycol (TEG)"
  modified_base (1)..(1): 5-methyl modified nucleotide
  modified_base (2)..(2): 5-methyl modified nucleotide
  modified_base (5)..(5): 5-methyl modified nucleotide
  modified_base (8)..(8): 5-methyl modified nucleotide
  modified_base (20)..(20): 5-methyl modified nucleotide
  modified_base (23)..(23): bicyclic nucleic acid (BNA)
  modified_base (24)..(24): bicyclic nucleic acid (BNA)
ccaacaucaaggaagauggcautt

SEQ ID NO: 19721 - DNA, 23 bp, Artificial Sequence
  source: /note="Description of Artificial Sequence: Synthetic oligonucleotide"
  source: /note="Description of Combined DNA/RNA Molecule: Synthetic oligonucleotide"
  source: /note="DNA/RNA"
  source: /note="5' tri-ethylene glycol (TEG)"
  modified_base (1)..(1): 5-methyl modified nucleotide
  modified_base (2)..(2): 5-methyl modified nucleotide
  modified_base (5)..(5): 5-methyl modified nucleotide
  modified_base (8)..(8): 5-methyl modified nucleotide
  modified_base (20)..(20): 5-methyl modified nucleotide
  modified_base (22)..(22): bicyclic nucleic acid (BNA)
  modified_base (23)..(23): bicyclic nucleic acid (BNA)
ccaacaucaaggaagauggcatt

SEQ ID NO: 19722 - DNA, 22 bp, Artificial Sequence
  source: /note="Description of Artificial Sequence: Synthetic oligonucleotide"
  source: /note="Description of Combined DNA/RNA Molecule: Synthetic oligonucleotide"
  source: /note="DNA/RNA"
  source: /note="5' tri-ethylene glycol (TEG)"
  modified_base (1)..(1): 5-methyl modified nucleotide
  modified_base (2)..(2): 5-methyl modified nucleotide
  modified_base (5)..(5): 5-methyl modified nucleotide
  modified_base (8)..(8): 5-methyl modified nucleotide
  modified_base (20)..(20): 5-methyl modified nucleotide
  modified_base (21)..(21): bicyclic nucleic acid (BNA)
  modified_base (22)..(22): bicyclic nucleic acid (BNA)
ccaacaucaaggaagauggcat

SEQ ID NO: 19723 - RNA, 21 nt, Artificial Sequence
  source: /note="Description of Artificial Sequence: Synthetic oligonucleotide"
  source: /note="RNA"
  source: /note="5' tri-ethylene glycol (TEG)"
  modified_base (1)..(1): 5-methyl modified nucleotide
  modified_base (2)..(2): 5-methyl modified nucleotide
  modified_base (5)..(5): 5-methyl modified nucleotide
  modified_base (8)..(8): 5-methyl modified nucleotide
  modified_base (20)..(20): 5-methyl bicyclic nucleic acid
  modified_base (21)..(21): bicyclic nucleic acid (BNA)
ccaacaucaaggaagauggca

SEQ ID NO: 19724 - RNA, 20 nt, Artificial Sequence
  source: /note="Description of Artificial Sequence: Synthetic oligonucleotide"
  source: /note="RNA"
  source: /note="5' tri-ethylene glycol (TEG)"
  modified_base (1)..(1): 5-methyl modified nucleotide
  modified_base (2)..(2): 5-methyl modified nucleotide
  modified_base (5)..(5): 5-methyl modified nucleotide
  modified_base (8)..(8): 5-methyl modified nucleotide
  modified_base (19)..(19): bicyclic nucleic acid (BNA)
  modified_base (20)..(20): 5-methyl bicyclic nucleic acid
ccaacaucaaggaagauggc

SEQ ID NO: 19725 - RNA, 19 nt, Artificial Sequence
  source: /note="Description of Artificial Sequence: Synthetic oligonucleotide"
  source: /note="RNA"
  source: /note="5' tri-ethylene glycol (TEG)"
  modified_base (1)..(1): 5-methyl modified nucleotide
  modified_base (2)..(2): 5-methyl modified nucleotide
  modified_base (5)..(5): 5-methyl modified nucleotide
  modified_base (8)..(8): 5-methyl modified nucleotide
  modified_base (18)..(18): bicyclic nucleic acid (BNA)
  modified_base (19)..(19): bicyclic nucleic acid (BNA)
ccaacaucaaggaagaugg

SEQ ID NO: 19726 - DNA, 18 bp, Artificial Sequence
  source: /note="Description of Artificial Sequence: Synthetic oligonucleotide"
  source: /note="Description of Combined DNA/RNA Molecule: Synthetic oligonucleotide"
  source: /note="DNA/RNA"
  source: /note="5' tri-ethylene glycol (TEG)"
  modified_base (1)..(1): 5-methyl modified nucleotide
  modified_base (2)..(2): 5-methyl modified nucleotide
  modified_base (5)..(5): 5-methyl modified nucleotide
  modified_base (8)..(8): 5-methyl modified nucleotide
  modified_base (17)..(17): bicyclic nucleic acid (BNA)
  modified_base (18)..(18): bicyclic nucleic acid (BNA)
ccaacaucaaggaagatg

SEQ ID NO: 19727 - DNA, 17 bp, Artificial Sequence
  source: /note="Description of Artificial Sequence: Synthetic oligonucleotide"
  source: /note="Description of Combined DNA/RNA Molecule: Synthetic oligonucleotide"
  source: /note="DNA/RNA"
  source: /note="5' tri-ethylene glycol (TEG)"
  modified_base (1)..(1): 5-methyl modified nucleotide
  modified_base (2)..(2): 5-methyl modified nucleotide
  modified_base (5)..(5): 5-methyl modified nucleotide
  modified_base (8)..(8): 5-methyl modified nucleotide
  modified_base (16)..(16): bicyclic nucleic acid (BNA)
  modified_base (17)..(17): bicyclic nucleic acid (BNA)
ccaacaucaaggaagat

SEQ ID NO: 19728 - RNA, 16 nt, Artificial Sequence
  source: /note="Description of Artificial Sequence: Synthetic oligonucleotide"
  source: /note="RNA"
  source: /note="5' tri-ethylene glycol (TEG)"
  modified_base (1)..(1): 5-methyl modified nucleotide
  modified_base (2)..(2): 5-methyl modified nucleotide
  modified_base (5)..(5): 5-methyl modified nucleotide
  modified_base (8)..(8): 5-methyl modified nucleotide
  modified_base (15)..(15): bicyclic nucleic acid (BNA)
  modified_base (16)..(16): bicyclic nucleic acid (BNA)
ccaacaucaaggaaga

SEQ ID NO: 19729 - RNA, 15 nt, Artificial Sequence
  source: /note="Description of Artificial Sequence: Synthetic oligonucleotide"
  source: /note="RNA"
  source: /note="5' tri-ethylene glycol (TEG)"
  modified_base (1)..(1): 5-methyl modified nucleotide
  modified_base (2)..(2): 5-methyl modified nucleotide
  modified_base (5)..(5): 5-methyl modified nucleotide
  modified_base (8)..(8): 5-methyl modified nucleotide
  modified_base (14)..(14): bicyclic nucleic acid (BNA)
  modified_base (15)..(15): bicyclic nucleic acid (BNA)
ccaacaucaaggaag

SEQ ID NO: 19730 - RNA, 27 nt, Artificial Sequence
  source: /note="Description of Artificial Sequence: Synthetic oligonucleotide"
  source: /note="RNA"
  source: /note="5' tri-ethylene glycol (TEG)"
  modified_base (1)..(1): 5-methyl modified nucleotide
  modified_base (4)..(4): 5-methyl modified nucleotide
  modified_base (7)..(7): 5-methyl modified nucleotide
  modified_base (19)..(19): 5-methyl modified nucleotide
  modified_base (24)..(24): 5-methyl modified nucleotide
  modified_base (26)..(26): bicyclic nucleic acid (BNA)
  modified_base (27)..(27): bicyclic nucleic acid (BNA)
caacaucaaggaagauggcauuucuag

SEQ ID NO: 19731 - DNA, 26 bp, Artificial Sequence
  source: /note="Description of Artificial Sequence: Synthetic oligonucleotide"
  source: /note="Description of Combined DNA/RNA Molecule: Synthetic oligonucleotide"
  source: /note="DNA/RNA"
  source: /note="5' tri-ethylene glycol (TEG)"
  modified_base (1)..(1): 5-methyl modified nucleotide
  modified_base (4)..(4): 5-methyl modified nucleotide
  modified_base (7)..(7): 5-methyl modified nucleotide
  modified_base (19)..(19): 5-methyl modified nucleotide
  modified_base (24)..(24): 5-methyl modified nucleotide
  modified_base (25)..(25): bicyclic nucleic acid (BNA)
  modified_base (26)..(26): bicyclic nucleic acid (BNA)
caacaucaaggaagauggcauuucta

SEQ ID NO: 19732 - DNA, 25 bp, Artificial Sequence
  source: /note="Description of Artificial Sequence: Synthetic oligonucleotide"
  source: /note="Description of Combined DNA/RNA Molecule: Synthetic oligonucleotide"
  source: /note="DNA/RNA"
  source: /note="5' tri-ethylene glycol (TEG)"
  modified_base (1)..(1): 5-methyl modified nucleotide
  modified_base (4)..(4): 5-methyl modified nucleotide
  modified_base (7)..(7): 5-methyl modified nucleotide
  modified_base (19)..(19): 5-methyl modified nucleotide
  modified_base (24)..(24): 5-methyl bicyclic nucleic acid
  modified_base (25)..(25): bicyclic nucleic acid (BNA)
caacaucaaggaagauggcauuuct

SEQ ID NO: 19733 - DNA, 24 bp, Artificial Sequence
  source: /note="Description of Artificial Sequence: Synthetic oligonucleotide"
  source: /note="Description of Combined DNA/RNA Molecule: Synthetic oligonucleotide"
  source: /note="DNA/RNA"
  source: /note="5' tri-ethylene glycol (TEG)"
  modified_base (1)..(1): 5-methyl modified nucleotide
  modified_base (4)..(4): 5-methyl modified nucleotide
  modified_base (7)..(7): 5-methyl modified nucleotide
  modified_base (19)..(19): 5-methyl modified nucleotide
  modified_base (23)..(23): bicyclic nucleic acid (BNA)
  modified_base (24)..(24): 5-methyl bicyclic nucleic acid
caacaucaaggaagauggcauutc

SEQ ID NO: 19734 - DNA, 23 bp, Artificial Sequence
  source: /note="Description of Artificial Sequence: Synthetic oligonucleotide"
  source: /note="Description of Combined DNA/RNA Molecule: Synthetic oligonucleotide"
  source: /note="DNA/RNA"
  source: /note="5' tri-ethylene glycol (TEG)"
  modified_base (1)..(1): 5-methyl modified nucleotide
  modified_base (4)..(4): 5-methyl modified nucleotide
  modified_base (7)..(7): 5-methyl modified nucleotide
  modified_base (19)..(19): 5-methyl modified nucleotide
  modified_base (22)..(22): bicyclic nucleic acid (BNA)
  modified_base (23)..(23): bicyclic nucleic acid (BNA)
caacaucaaggaagauggcautt

SEQ ID NO: 19735 - DNA, 22 bp, Artificial Sequence
  source: /note="Description of Artificial Sequence: Synthetic oligonucleotide"
  source: /note="Description of Combined DNA/RNA Molecule: Synthetic oligonucleotide"
  source: /note="DNA/RNA"
  source: /note="5' tri-ethylene glycol (TEG)"
  modified_base (1)..(1): 5-methyl modified nucleotide
  modified_base (4)..(4): 5-methyl modified nucleotide
  modified_base (7)..(7): 5-methyl modified nucleotide
  modified_base (19)..(19): 5-methyl modified nucleotide
  modified_base (21)..(21): bicyclic nucleic acid (BNA)
  modified_base (22)..(22): bicyclic nucleic acid (BNA)
caacaucaaggaagauggcatt

SEQ ID NO: 19736 - DNA, 21 bp, Artificial Sequence
  source: /note="Description of Artificial Sequence: Synthetic oligonucleotide"
  source: /note="Description of Combined DNA/RNA Molecule: Synthetic oligonucleotide"
  source: /note="DNA/RNA"
  source: /note="5' tri-ethylene glycol (TEG)"
  modified_base (1)..(1): 5-methyl modified nucleotide
  modified_base (4)..(4): 5-methyl modified nucleotide
  modified_base (7)..(7): 5-methyl modified nucleotide
  modified_base (19)..(19): 5-methyl modified nucleotide
  modified_base (20)..(20): bicyclic nucleic acid (BNA)
  modified_base (21)..(21): bicyclic nucleic acid (BNA)
caacaucaaggaagauggcat

SEQ ID NO: 19737 - RNA, 20 nt, Artificial Sequence
  source: /note="Description of Artificial Sequence: Synthetic oligonucleotide"
  source: /note="RNA"
  source: /note="5' tri-ethylene glycol (TEG)"
  modified_base (1)..(1): 5-methyl modified nucleotide
  modified_base (4)..(4): 5-methyl modified nucleotide
  modified_base (7)..(7): 5-methyl modified nucleotide
  modified_base (19)..(19): 5-methyl bicyclic nucleic acid
  modified_base (20)..(20): bicyclic nucleic acid (BNA)
caacaucaaggaagauggca

SEQ ID NO: 19738 - RNA, 19 nt, Artificial Sequence
  source: /note="Description of Artificial Sequence: Synthetic oligonucleotide"
  source: /note="RNA"
  source: /note="5' tri-ethylene glycol (TEG)"
  modified_base (1)..(1): 5-methyl modified nucleotide
  modified_base (4)..(4): 5-methyl modified nucleotide
  modified_base (7)..(7): 5-methyl modified nucleotide
  modified_base (18)..(18): bicyclic nucleic acid (BNA)
  modified_base (19)..(19): 5-methyl bicyclic nucleic acid
caacaucaaggaagauggc

SEQ ID NO: 19739 - RNA, 18 nt, Artificial Sequence
  source: /note="Description of Artificial Sequence: Synthetic oligonucleotide"
  source: /note="RNA"
  source: /note="5' tri-ethylene glycol (TEG)"
  modified_base (1)..(1): 5-methyl modified nucleotide
  modified_base (4)..(4): 5-methyl modified nucleotide
  modified_base (7)..(7): 5-methyl modified nucleotide
  modified_base (17)..(17): bicyclic nucleic acid (BNA)
  modified_base (18)..(18): bicyclic nucleic acid (BNA)
caacaucaaggaagaugg

SEQ ID NO: 19740 - DNA, 17 bp, Artificial Sequence
  source: /note="Description of Artificial Sequence: Synthetic oligonucleotide"
  source: /note="Description of Combined DNA/RNA Molecule: Synthetic oligonucleotide"
  source: /note="DNA/RNA"
  source: /note="5' tri-ethylene glycol (TEG)"
  modified_base (1)..(1): 5-methyl modified nucleotide
  modified_base (4)..(4): 5-methyl modified nucleotide
  modified_base (7)..(7): 5-methyl modified nucleotide
  modified_base (16)..(16): bicyclic nucleic acid (BNA)
  modified_base (17)..(17): bicyclic nucleic acid (BNA)
caacaucaaggaagatg

SEQ ID NO: 19741 - DNA, 16 bp, Artificial Sequence
  source: /note="Description of Artificial Sequence: Synthetic oligonucleotide"
  source: /note="Description of Combined DNA/RNA Molecule: Synthetic oligonucleotide"
  source: /note="DNA/RNA"
  source: /note="5' tri-ethylene glycol (TEG)"
  modified_base (1)..(1): 5-methyl modified nucleotide
  modified_base (4)..(4): 5-methyl modified nucleotide
  modified_base (7)..(7): 5-methyl modified nucleotide
  modified_base (15)..(15): bicyclic nucleic acid (BNA)
  modified_base (16)..(16): bicyclic nucleic acid (BNA)
caacaucaaggaagat

SEQ ID NO: 19742 - RNA, 15 nt, Artificial Sequence
  source: /note="Description of Artificial Sequence: Synthetic oligonucleotide"
  source: /note="RNA"
  source: /note="5' tri-ethylene glycol (TEG)"
  modified_base (1)..(1): 5-methyl modified nucleotide
  modified_base (4)..(4): 5-methyl modified nucleotide
  modified_base (7)..(7): 5-methyl modified nucleotide
  modified_base (14)..(14): bicyclic nucleic acid (BNA)
  modified_base (15)..(15): bicyclic nucleic acid (BNA)
caacaucaaggaaga

SEQ ID NO: 19743 - RNA, 14 nt, Artificial Sequence
  source: /note="Description of Artificial Sequence: Synthetic oligonucleotide"
  source: /note="RNA"
  source: /note="5' tri-ethylene glycol (TEG)"
  modified_base (1)..(1): 5-methyl modified nucleotide
  modified_base (4)..(4): 5-methyl modified nucleotide
  modified_base (7)..(7): 5-methyl modified nucleotide
  modified_base (13)..(13): bicyclic nucleic acid (BNA)
  modified_base (14)..(14): bicyclic nucleic acid (BNA)
caacaucaaggaag

SEQ ID NO: 19744 - RNA, 26 nt, Artificial Sequence
  source: /note="Description of Artificial Sequence: Synthetic oligonucleotide"
  source: /note="RNA"
  source: /note="5' tri-ethylene glycol (TEG)"
  modified_base (3)..(3): 5-methyl modified nucleotide
  modified_base (6)..(6): 5-methyl modified nucleotide
  modified_base (18)..(18): 5-methyl modified nucleotide
  modified_base (23)..(23): 5-methyl modified nucleotide
  modified_base (25)..(25): bicyclic nucleic acid (BNA)
  modified_base (26)..(26): bicyclic nucleic acid (BNA)
aacaucaaggaagauggcauuucuag

SEQ ID NO: 19745 - DNA, 25 bp, Artificial Sequence
  source: /note="Description of Artificial Sequence: Synthetic oligonucleotide"
  source: /note="Description of Combined DNA/RNA Molecule: Synthetic oligonucleotide"
  source: /note="DNA/RNA"
  source: /note="5' tri-ethylene glycol (TEG)"
  modified_base (3)..(3): 5-methyl modified nucleotide
  modified_base (6)..(6): 5-methyl modified nucleotide
  modified_base (18)..(18): 5-methyl modified nucleotide
  modified_base (23)..(23): 5-methyl modified nucleotide
  modified_base (24)..(24): bicyclic nucleic acid (BNA)
  modified_base (25)..(25): bicyclic nucleic acid (BNA)
aacaucaaggaagauggcauuucta

SEQ ID NO: 19746 - DNA, 24 bp, Artificial Sequence
  source: /note="Description of Artificial Sequence: Synthetic oligonucleotide"
  source: /note="Description of Combined DNA/RNA Molecule: Synthetic oligonucleotide"
  source: /note="DNA/RNA"
  source: /note="5' tri-ethylene glycol (TEG)"
  modified_base (3)..(3): 5-methyl modified nucleotide
  modified_base (6)..(6): 5-methyl modified nucleotide
  modified_base (18)..(18): 5-methyl modified nucleotide
  modified_base (23)..(23): 5-methyl bicyclic nucleic acid
  modified_base (24)..(24): bicyclic nucleic acid (BNA)
aacaucaaggaagauggcauuuct

SEQ ID NO: 19747 - DNA, 23 bp, Artificial Sequence
  source: /note="Description of Artificial Sequence: Synthetic oligonucleotide"
  source: /note="Description of Combined DNA/RNA Molecule: Synthetic oligonucleotide"
  source: /note="DNA/RNA"
  source: /note="5' tri-ethylene glycol (TEG)"
  modified_base (3)..(3): 5-methyl modified nucleotide
  modified_base (6)..(6): 5-methyl modified nucleotide
  modified_base (18)..(18): 5-methyl modified nucleotide
  modified_base (22)..(22): bicyclic nucleic acid (BNA)
  modified_base (23)..(23): 5-methyl bicyclic nucleic acid
aacaucaaggaagauggcauutc

SEQ ID NO: 19748 - DNA, 22 bp, Artificial Sequence
  source: /note="Description of Artificial Sequence: Synthetic oligonucleotide"
  source: /note="Description of Combined DNA/RNA Molecule: Synthetic oligonucleotide"
  source: /note="DNA/RNA"
  source: /note="5' tri-ethylene glycol (TEG)"
  modified_base (3)..(3): 5-methyl modified nucleotide
  modified_base (6)..(6): 5-methyl modified nucleotide
  modified_base (18)..(18): 5-methyl modified nucleotide
  modified_base (21)..(21): bicyclic nucleic acid (BNA)
  modified_base (22)..(22): bicyclic nucleic acid (BNA)
aacaucaaggaagauggcautt

SEQ ID NO: 19749 - DNA, 21 bp, Artificial Sequence
  source: /note="Description of Artificial Sequence: Synthetic oligonucleotide"
  source: /note="Description of Combined DNA/RNA Molecule: Synthetic oligonucleotide"
  source: /note="DNA/RNA"
  source: /note="5' tri-ethylene glycol (TEG)"
  modified_base (3)..(3): 5-methyl modified nucleotide
  modified_base (6)..(6): 5-methyl modified nucleotide
  modified_base (18)..(18): 5-methyl modified nucleotide
  modified_base (20)..(20): bicyclic nucleic acid (BNA)
  modified_base (21)..(21): bicyclic nucleic acid (BNA)
aacaucaaggaagauggcatt

SEQ ID NO: 19750 - DNA, 20 bp, Artificial Sequence
  source: /note="Description of Artificial Sequence: Synthetic oligonucleotide"
  source: /note="Description of Combined DNA/RNA Molecule: Synthetic oligonucleotide"
  source: /note="DNA/RNA"
  source: /note="5' tri-ethylene glycol (TEG)"
  modified_base (3)..(3): 5-methyl modified nucleotide
  modified_base (6)..(6): 5-methyl modified nucleotide
  modified_base (18)..(18): 5-methyl modified nucleotide
  modified_base (19)..(19): bicyclic nucleic acid (BNA)
  modified_base (20)..(20): bicyclic nucleic acid (BNA)
aacaucaaggaagauggcat

SEQ ID NO: 19751 - RNA, 19 nt, Artificial Sequence
  source: /note="Description of Artificial Sequence: Synthetic oligonucleotide"
  source: /note="RNA"
  source: /note="5' tri-ethylene glycol (TEG)"
  modified_base (3)..(3): 5-methyl modified nucleotide
  modified_base (6)..(6): 5-methyl modified nucleotide
  modified_base (18)..(18): 5-methyl bicyclic nucleic acid
  modified_base (19)..(19): bicyclic nucleic acid (BNA)
aacaucaaggaagauggca

SEQ ID NO: 19752 - RNA, 18 nt, Artificial Sequence
  source: /note="Description of Artificial Sequence: Synthetic oligonucleotide"
  source: /note="RNA"
  source: /note="5' tri-ethylene glycol (TEG)"
  modified_base (3)..(3): 5-methyl modified nucleotide
  modified_base (6)..(6): 5-methyl modified nucleotide
  modified_base (17)..(17): bicyclic nucleic acid (BNA)
  modified_base (18)..(18): 5-methyl bicyclic nucleic acid
aacaucaaggaagauggc

SEQ ID NO: 19753 - RNA, 17 nt, Artificial Sequence
  source: /note="Description of Artificial Sequence: Synthetic oligonucleotide"
  source: /note="RNA"
  source: /note="5' tri-ethylene glycol (TEG)"
  modified_base (3)..(3): 5-methyl modified nucleotide
  modified_base (6)..(6): 5-methyl modified nucleotide
  modified_base (16)..(16): bicyclic nucleic acid (BNA)
  modified_base (17)..(17): bicyclic nucleic acid (BNA)
aacaucaaggaagaugg

SEQ ID NO: 19754 - DNA, 16 bp, Artificial Sequence
  source: /note="Description of Artificial Sequence: Synthetic oligonucleotide"
  source: /note="Description of Combined DNA/RNA Molecule: Synthetic oligonucleotide"
  source: /note="DNA/RNA"
  source: /note="5' tri-ethylene glycol (TEG)"
  modified_base (3)..(3): 5-methyl modified nucleotide
  modified_base (6)..(6): 5-methyl modified nucleotide
  modified_base (15)..(15): bicyclic nucleic acid (BNA)
  modified_base (16)..(16): bicyclic nucleic acid (BNA)
aacaucaaggaagatg

SEQ ID NO: 19755 - DNA, 15 bp, Artificial Sequence
  source: /note="Description of Artificial Sequence: Synthetic oligonucleotide"
  source: /note="Description of Combined DNA/RNA Molecule: Synthetic oligonucleotide"
  source: /note="DNA/RNA"
  source: /note="5' tri-ethylene glycol (TEG)"
  modified_base (3)..(3): 5-methyl modified nucleotide
  modified_base (6)..(6): 5-methyl modified nucleotide
  modified_base (14)..(14): bicyclic nucleic acid (BNA)
  modified_base (15)..(15): bicyclic nucleic acid (BNA)
aacaucaaggaagat

SEQ ID NO: 19756 - RNA, 14 nt, Artificial Sequence
  source: /note="Description of Artificial Sequence: Synthetic oligonucleotide"
  source: /note="RNA"
  source: /note="5' tri-ethylene glycol (TEG)"
  modified_base (3)..(3): 5-methyl modified nucleotide
  modified_base (6)..(6): 5-methyl modified nucleotide
  modified_base (13)..(13): bicyclic nucleic acid (BNA)
  modified_base (14)..(14): bicyclic nucleic acid (BNA)
aacaucaaggaaga

SEQ ID NO: 19757 - RNA, 13 nt, Artificial Sequence
  source: /note="Description of Artificial Sequence: Synthetic oligonucleotide"
  source: /note="RNA"
  source: /note="5' tri-ethylene glycol (TEG)"
  modified_base (3)..(3): 5-methyl modified nucleotide
  modified_base (6)..(6): 5-methyl modified nucleotide
  modified_base (12)..(12): bicyclic nucleic acid (BNA)
  modified_base (13)..(13): bicyclic nucleic acid (BNA)
aacaucaaggaag

SEQ ID NO: 19758 - RNA, 25 nt, Artificial Sequence
  source: /note="Description of Artificial Sequence: Synthetic oligonucleotide"
  source: /note="RNA"
  source: /note="5' tri-ethylene glycol (TEG)"
  modified_base (2)..(2): 5-methyl modified nucleotide
  modified_base (5)..(5): 5-methyl modified nucleotide
  modified_base (17)..(17): 5-methyl modified nucleotide
  modified_base (22)..(22): 5-methyl modified nucleotide
  modified_base (24)..(24): bicyclic nucleic acid (BNA)
  modified_base (25)..(25): bicyclic nucleic acid (BNA)
acaucaaggaagauggcauuucuag

SEQ ID NO: 19759 - DNA, 24 bp, Artificial Sequence
  source: /note="Description of Artificial Sequence: Synthetic oligonucleotide"
  source: /note="Description of Combined DNA/RNA Molecule: Synthetic oligonucleotide"
  source: /note="DNA/RNA"
  source: /note="5' tri-ethylene glycol (TEG)"
  modified_base (2)..(2): 5-methyl modified nucleotide
  modified_base (5)..(5): 5-methyl modified nucleotide
  modified_base (17)..(17): 5-methyl modified nucleotide
  modified_base (22)..(22): 5-methyl modified nucleotide
  modified_base (23)..(23): bicyclic nucleic acid (BNA)
  modified_base (24)..(24): bicyclic nucleic acid (BNA)
acaucaaggaagauggcauuucta

SEQ ID NO: 19760 - DNA, 23 bp, Artificial Sequence
  source: /note="Description of Artificial Sequence: Synthetic oligonucleotide"
  source: /note="Description of Combined DNA/RNA Molecule: Synthetic oligonucleotide"
  source: /note="DNA/RNA"
  source: /note="5' tri-ethylene glycol (TEG)"
  modified_base (2)..(2): 5-methyl modified nucleotide
  modified_base (5)..(5): 5-methyl modified nucleotide
  modified_base (17)..(17): 5-methyl modified nucleotide
  modified_base (22)..(22): 5-methyl bicyclic nucleic acid
  modified_base (23)..(23): bicyclic nucleic acid (BNA)
acaucaaggaagauggcauuuct

SEQ ID NO: 19761 - DNA, 22 bp, Artificial Sequence
  source: /note="Description of Artificial Sequence: Synthetic oligonucleotide"
  source: /note="Description of Combined DNA/RNA Molecule: Synthetic oligonucleotide"
  source: /note="DNA/RNA"
  source: /note="5' tri-ethylene glycol (TEG)"
  modified_base (2)..(2): 5-methyl modified nucleotide
  modified_base (5)..(5): 5-methyl modified nucleotide
  modified_base (17)..(17): 5-methyl modified nucleotide
  modified_base (21)..(21): bicyclic nucleic acid (BNA)
  modified_base (22)..(22): 5-methyl bicyclic nucleic acid
acaucaaggaagauggcauutc

SEQ ID NO: 19762 - DNA, 21 bp, Artificial Sequence
  source: /note="Description of Artificial Sequence: Synthetic oligonucleotide"
  source: /note="Description of Combined DNA/RNA Molecule: Synthetic oligonucleotide"
  source: /note="DNA/RNA"
  source: /note="5' tri-ethylene glycol (TEG)"
  modified_base (2)..(2): 5-methyl modified nucleotide
  modified_base (5)..(5): 5-methyl modified nucleotide
  modified_base (17)..(17): 5-methyl modified nucleotide
  modified_base (20)..(20): bicyclic nucleic acid (BNA)
  modified_base (21)..(21): bicyclic nucleic acid (BNA)
acaucaaggaagauggcautt

SEQ ID NO: 19763 - DNA, 20 bp, Artificial Sequence
  source: /note="Description of Artificial Sequence: Synthetic oligonucleotide"
  source: /note="Description of Combined DNA/RNA Molecule: Synthetic oligonucleotide"
  source: /note="DNA/RNA"
  source: /note="5' tri-ethylene glycol (TEG)"
  modified_base (2)..(2): 5-methyl modified nucleotide
  modified_base (5)..(5): 5-methyl modified nucleotide
  modified_base (17)..(17): 5-methyl modified nucleotide
  modified_base (19)..(19): bicyclic nucleic acid (BNA)
  modified_base (20)..(20): bicyclic nucleic acid (BNA)
acaucaaggaagauggcatt

SEQ ID NO: 19764 - DNA, 19 bp, Artificial Sequence
  source: /note="Description of Artificial Sequence: Synthetic oligonucleotide"
  source: /note="Description of Combined DNA/RNA Molecule: Synthetic oligonucleotide"
  source: /note="DNA/RNA"
  source: /note="5' tri-ethylene glycol (TEG)"
  modified_base (2)..(2): 5-methyl modified nucleotide
  modified_base (5)..(5): 5-methyl modified nucleotide
  modified_base (17)..(17): 5-methyl modified nucleotide
  modified_base (18)..(18): bicyclic nucleic acid (BNA)
  modified_base (19)..(19): bicyclic nucleic acid (BNA)
acaucaaggaagauggcat

SEQ ID NO: 19765 - RNA, 18 nt, Artificial Sequence
  source: /note="Description of Artificial Sequence: Synthetic oligonucleotide"
  source: /note="RNA"
  source: /note="5' tri-ethylene glycol (TEG)"
  modified_base (2)..(2): 5-methyl modified nucleotide
  modified_base (5)..(5): 5-methyl modified nucleotide
  modified_base (17)..(17): 5-methyl bicyclic nucleic acid
  modified_base (18)..(18): bicyclic nucleic acid (BNA)
acaucaaggaagauggca

SEQ ID NO: 19766 - RNA, 17 nt, Artificial Sequence
  source: /note="Description of Artificial Sequence: Synthetic oligonucleotide"
  source: /note="RNA"
  source: /note="5' tri-ethylene glycol (TEG)"
  modified_base (2)..(2): 5-methyl modified nucleotide
  modified_base (5)..(5): 5-methyl modified nucleotide
  modified_base (16)..(16): bicyclic nucleic acid (BNA)
  modified_base (17)..(17): 5-methyl bicyclic nucleic acid
acaucaaggaagauggc

SEQ ID NO: 19767 - RNA, 16 nt, Artificial Sequence
  source: /note="Description of Artificial Sequence: Synthetic oligonucleotide"
  source: /note="RNA"
  source: /note="5' tri-ethylene glycol (TEG)"
  modified_base (2)..(2): 5-methyl modified nucleotide
  modified_base (5)..(5): 5-methyl modified nucleotide
  modified_base (15)..(15): bicyclic nucleic acid (BNA)
  modified_base (16)..(16): bicyclic nucleic acid (BNA)
acaucaaggaagaugg

SEQ ID NO: 19768 - DNA, 15 bp, Artificial Sequence
  source: /note="Description of Artificial Sequence: Synthetic oligonucleotide"
  source: /note="Description of Combined DNA/RNA Molecule: Synthetic oligonucleotide"
  source: /note="DNA/RNA"
  source: /note="5' tri-ethylene glycol (TEG)"
  modified_base (2)..(2): 5-methyl modified nucleotide
  modified_base (5)..(5): 5-methyl modified nucleotide
  modified_base (14)..(14): bicyclic nucleic acid (BNA)
  modified_base (15)..(15): bicyclic nucleic acid (BNA)
acaucaaggaagatg

SEQ ID NO: 19769 - DNA, 14 bp, Artificial Sequence
  source: /note="Description of Artificial Sequence: Synthetic oligonucleotide"
  source: /note="Description of Combined DNA/RNA Molecule: Synthetic oligonucleotide"
  source: /note="DNA/RNA"
  source: /note="5' tri-ethylene glycol (TEG)"
  modified_base (2)..(2): 5-methyl modified nucleotide
  modified_base (5)..(5): 5-methyl modified nucleotide
  modified_base (13)..(13): bicyclic nucleic acid (BNA)
  modified_base (14)..(14): bicyclic nucleic acid (BNA)
acaucaaggaagat

SEQ ID NO: 19770 - RNA, 13 nt, Artificial Sequence
  source: /note="Description of Artificial Sequence: Synthetic oligonucleotide"
  source: /note="RNA"
  source: /note="5' tri-ethylene glycol (TEG)"
  modified_base (2)..(2): 5-methyl modified nucleotide
  modified_base (5)..(5): 5-methyl modified nucleotide
  modified_base (12)..(12): bicyclic nucleic acid (BNA)
  modified_base (13)..(13): bicyclic nucleic acid (BNA)
acaucaaggaaga

SEQ ID NO: 19771 - RNA, 12 nt, Artificial Sequence
  source: /note="Description of Artificial Sequence: Synthetic oligonucleotide"
  source: /note="RNA"
  source: /note="5' tri-ethylene glycol (TEG)"
  modified_base (2)..(2): 5-methyl modified nucleotide
  modified_base (5)..(5): 5-methyl modified nucleotide
  modified_base (11)..(11): bicyclic nucleic acid (BNA)
  modified_base (12)..(12): bicyclic nucleic acid (BNA)
acaucaaggaag

SEQ ID NO: 19772 - RNA, 24 nt, Artificial Sequence
  source: /note="Description of Artificial Sequence: Synthetic oligonucleotide"
  source: /note="RNA"
  source: /note="5' tri-ethylene glycol (TEG)"
  modified_base (1)..(1): 5-methyl modified nucleotide
  modified_base (4)..(4): 5-methyl modified nucleotide
  modified_base (16)..(16): 5-methyl modified nucleotide
  modified_base (21)..(21): 5-methyl modified nucleotide
  modified_base (23)..(23): bicyclic nucleic acid (BNA)
  modified_base (24)..(24): bicyclic nucleic acid (BNA)
caucaaggaagauggcauuucuag

SEQ ID NO: 19773 - DNA, 23 bp, Artificial Sequence
  source: /note="Description of Artificial Sequence: Synthetic oligonucleotide"
  source: /note="Description of Combined DNA/RNA Molecule: Synthetic oligonucleotide"
  source: /note="DNA/RNA"
  source: /note="5' tri-ethylene glycol (TEG)"
  modified_base (1)..(1): 5-methyl modified nucleotide
  modified_base (4)..(4): 5-methyl modified nucleotide
  modified_base (16)..(16): 5-methyl modified nucleotide
  modified_base (21)..(21): 5-methyl modified nucleotide
  modified_base (22)..(22): bicyclic nucleic acid (BNA)
  modified_base (23)..(23): bicyclic nucleic acid (BNA)
caucaaggaagauggcauuucta

SEQ ID NO: 19774 - DNA, 22 bp, Artificial Sequence
  source: /note="Description of Artificial Sequence: Synthetic oligonucleotide"
  source: /note="Description of Combined DNA/RNA Molecule: Synthetic oligonucleotide"
  source: /note="DNA/RNA"
  source: /note="5' tri-ethylene glycol (TEG)"
  modified_base (1)..(1): 5-methyl modified nucleotide
  modified_base (4)..(4): 5-methyl modified nucleotide
  modified_base (16)..(16): 5-methyl modified nucleotide
  modified_base (21)..(21): 5-methyl bicyclic nucleic acid
  modified_base (22)..(22): bicyclic nucleic acid (BNA)
caucaaggaagauggcauuuct

SEQ ID NO: 19775 - DNA, 21 bp, Artificial Sequence
  source: /note="Description of Artificial Sequence: Synthetic oligonucleotide"
  source: /note="Description of Combined DNA/RNA Molecule: Synthetic oligonucleotide"
  source: /note="DNA/RNA"
  source: /note="5' tri-ethylene glycol (TEG)"
  modified_base (1)..(1): 5-methyl modified nucleotide
  modified_base (4)..(4): 5-methyl modified nucleotide
  modified_base (16)..(16): 5-methyl modified nucleotide
  modified_base (20)..(20): bicyclic nucleic acid (BNA)
  modified_base (21)..(21): 5-methyl bicyclic nucleic acid
caucaaggaagauggcauutc

SEQ ID NO: 19776 - DNA, 20 bp, Artificial Sequence
  source: /note="Description of Artificial Sequence: Synthetic oligonucleotide"
  source: /note="Description of Combined DNA/RNA Molecule: Synthetic oligonucleotide"
  source: /note="DNA/RNA"
  source: /note="5' tri-ethylene glycol (TEG)"
  modified_base (1)..(1): 5-methyl modified nucleotide
  modified_base (4)..(4): 5-methyl modified nucleotide
  modified_base (16)..(16): 5-methyl modified nucleotide
  modified_base (19)..(19): bicyclic nucleic acid (BNA)
  modified_base (20)..(20): bicyclic nucleic acid (BNA)
caucaaggaagauggcautt

SEQ ID NO: 19777 - DNA, 19 bp, Artificial Sequence
  source: /note="Description of Artificial Sequence: Synthetic oligonucleotide"
  source: /note="Description of Combined DNA/RNA Molecule: Synthetic oligonucleotide"
  source: /note="DNA/RNA"
  source: /note="5' tri-ethylene glycol (TEG)"
  modified_base (1)..(1): 5-methyl modified nucleotide
  modified_base (4)..(4): 5-methyl modified nucleotide
  modified_base (16)..(16): 5-methyl modified nucleotide
  modified_base (18)..(18): bicyclic nucleic acid (BNA)
  modified_base (19)..(19): bicyclic nucleic acid (BNA)
caucaaggaagauggcatt

SEQ ID NO: 19778 - DNA, 18 bp, Artificial Sequence
  source: /note="Description of Artificial Sequence: Synthetic oligonucleotide"
  source: /note="Description of Combined DNA/RNA Molecule: Synthetic oligonucleotide"
  source: /note="DNA/RNA"
  source: /note="5' tri-ethylene glycol (TEG)"
  modified_base (1)..(1): 5-methyl modified nucleotide
  modified_base (4)..(4): 5-methyl modified nucleotide
  modified_base (16)..(16): 5-methyl modified nucleotide
  modified_base (17)..(17): bicyclic nucleic acid (BNA)
  modified_base (18)..(18): bicyclic nucleic acid (BNA)
caucaaggaagauggcat

SEQ ID NO: 19779 - RNA, 17 nt, Artificial Sequence
  source: /note="Description of Artificial Sequence: Synthetic oligonucleotide"
  source: /note="RNA"
  source: /note="5' tri-ethylene glycol (TEG)"
  modified_base (1)..(1): 5-methyl modified nucleotide
  modified_base (4)..(4): 5-methyl modified nucleotide
  modified_base (16)..(16): 5-methyl bicyclic nucleic acid
  modified_base (17)..(17): bicyclic nucleic acid (BNA)
caucaaggaagauggca

SEQ ID NO: 19780 - RNA, 16 nt, Artificial Sequence
  source: /note="Description of Artificial Sequence: Synthetic oligonucleotide"
  source: /note="RNA"
  source: /note="5' tri-ethylene glycol (TEG)"
  modified_base (1)..(1): 5-methyl modified nucleotide
  modified_base (4)..(4): 5-methyl modified nucleotide
  modified_base (15)..(15): bicyclic nucleic acid (BNA)
  modified_base (16)..(16): 5-methyl bicyclic nucleic acid
caucaaggaagauggc

SEQ ID NO: 19781 - RNA, 15 nt, Artificial Sequence
  source: /note="Description of Artificial Sequence: Synthetic oligonucleotide"
  source: /note="RNA"
  source: /note="5' tri-ethylene glycol (TEG)"
  modified_base (1)..(1): 5-methyl modified nucleotide
  modified_base (4)..(4): 5-methyl modified nucleotide
  modified_base (14)..(14): bicyclic nucleic acid (BNA)
  modified_base (15)..(15): bicyclic nucleic acid (BNA)
caucaaggaagaugg

SEQ ID NO: 19782 - DNA, 14 bp, Artificial Sequence
  source: /note="Description of Artificial Sequence: Synthetic oligonucleotide"
  source: /note="Description of Combined DNA/RNA Molecule: Synthetic oligonucleotide"
  source: /note="DNA/RNA"
  source: /note="5' tri-ethylene glycol (TEG)"
  modified_base (1)..(1): 5-methyl modified nucleotide
  modified_base (4)..(4): 5-methyl modified nucleotide
  modified_base (13)..(13): bicyclic nucleic acid (BNA)
  modified_base (14)..(14): bicyclic nucleic acid (BNA)
caucaaggaagatg

SEQ ID NO: 19783 - DNA, 13 bp, Artificial Sequence
  source: /note="Description of Artificial Sequence: Synthetic oligonucleotide"
  source: /note="Description of Combined DNA/RNA Molecule: Synthetic oligonucleotide"
  source: /note="DNA/RNA"
  source: /note="5' tri-ethylene glycol (TEG)"
  modified_base (1)..(1): 5-methyl modified nucleotide
  modified_base (4)..(4): 5-methyl modified nucleotide
  modified_base (12)..(12): bicyclic nucleic acid (BNA)
  modified_base (13)..(13): bicyclic nucleic acid (BNA)
caucaaggaagat

SEQ ID NO: 19784 - RNA, 12 nt, Artificial Sequence
  source: /note="Description of Artificial Sequence: Synthetic oligonucleotide"
  source: /note="RNA"
  source: /note="5' tri-ethylene glycol (TEG)"
  modified_base (1)..(1): 5-methyl modified nucleotide
  modified_base (4)..(4): 5-methyl modified nucleotide
  modified_base (11)..(11): bicyclic nucleic acid (BNA)
  modified_base (12)..(12): bicyclic nucleic acid (BNA)
caucaaggaaga

SEQ ID NO: 19785 - RNA, 11 nt, Artificial Sequence
  source: /note="Description of Artificial Sequence: Synthetic oligonucleotide"
  source: /note="RNA"
  source: /note="5' tri-ethylene glycol (TEG)"
  modified_base (1)..(1): 5-methyl modified nucleotide
  modified_base (4)..(4): 5-methyl modified nucleotide
  modified_base (10)..(10): bicyclic nucleic acid (BNA)
  modified_base (11)..(11): bicyclic nucleic acid (BNA)
caucaaggaag

SEQ ID NO: 19786 - RNA, 23 nt, Artificial Sequence
  source: /note="Description of Artificial Sequence: Synthetic oligonucleotide"
  source: /note="RNA"
  source: /note="5' tri-ethylene glycol (TEG)"
  modified_base (3)..(3): 5-methyl modified nucleotide
  modified_base (15)..(15): 5-methyl modified nucleotide
  modified_base (20)..(20): 5-methyl modified nucleotide
  modified_base (22)..(22): bicyclic nucleic acid (BNA)
  modified_base (23)..(23): bicyclic nucleic acid (BNA)
aucaaggaagauggcauuucuag

SEQ ID NO: 19787 - DNA, 22 bp, Artificial Sequence
  source: /note="Description of Artificial Sequence: Synthetic oligonucleotide"
  source: /note="Description of Combined DNA/RNA Molecule: Synthetic oligonucleotide"
  source: /note="DNA/RNA"
  source: /note="5' tri-ethylene glycol (TEG)"
  modified_base (3)..(3): 5-methyl modified nucleotide
  modified_base (15)..(15): 5-methyl modified nucleotide
  modified_base (20)..(20): 5-methyl modified nucleotide
  modified_base (21)..(21): bicyclic nucleic acid (BNA)
  modified_base (22)..(22): bicyclic nucleic acid (BNA)
aucaaggaagauggcauuucta

SEQ ID NO: 19788 - DNA, 21 bp, Artificial Sequence
  source: /note="Description of Artificial Sequence: Synthetic oligonucleotide"
  source: /note="Description of Combined DNA/RNA Molecule: Synthetic oligonucleotide"
  source: /note="DNA/RNA"
  source: /note="5' tri-ethylene glycol (TEG)"
  modified_base (3)..(3): 5-methyl modified nucleotide
  modified_base (15)..(15): 5-methyl modified nucleotide
  modified_base (20)..(20): 5-methyl bicyclic nucleic acid
  modified_base (21)..(21): bicyclic nucleic acid (BNA)
aucaaggaagauggcauuuct

SEQ ID NO: 19789 - DNA, 20 bp, Artificial Sequence
  source: /note="Description of Artificial Sequence: Synthetic oligonucleotide"
  source: /note="Description of Combined DNA/RNA Molecule: Synthetic oligonucleotide"
  source: /note="DNA/RNA"
  source: /note="5' tri-ethylene glycol (TEG)"
  modified_base (3)..(3): 5-methyl modified nucleotide
  modified_base (15)..(15): 5-methyl modified nucleotide
  modified_base (19)..(19): bicyclic nucleic acid (BNA)
  modified_base (20)..(20): 5-methyl bicyclic nucleic acid
aucaaggaagauggcauutc

SEQ ID NO: 19790 - DNA, 19 bp, Artificial Sequence
  source: /note="Description of Artificial Sequence: Synthetic oligonucleotide"
  source: /note="Description of Combined DNA/RNA Molecule: Synthetic oligonucleotide"
  source: /note="DNA/RNA"
  source: /note="5' tri-ethylene glycol (TEG)"
  modified_base (3)..(3): 5-methyl modified nucleotide
  modified_base (15)..(15): 5-methyl modified nucleotide
  modified_base (18)..(18): bicyclic nucleic acid (BNA)
  modified_base (19)..(19): bicyclic nucleic acid (BNA)
aucaaggaagauggcautt

SEQ ID NO: 19791 - DNA, 18 bp, Artificial Sequence
  source: /note="Description of Artificial Sequence: Synthetic oligonucleotide"
  source: /note="Description of Combined DNA/RNA Molecule: Synthetic oligonucleotide"
  source: /note="DNA/RNA"
  source: /note="5' tri-ethylene glycol (TEG)"
  modified_base (3)..(3): 5-methyl modified nucleotide
  modified_base (15)..(15): 5-methyl modified nucleotide
  modified_base (17)..(17): bicyclic nucleic acid (BNA)
  modified_base (18)..(18): bicyclic nucleic acid (BNA)
aucaaggaagauggcatt

SEQ ID NO: 19792 - DNA, 17 bp, Artificial Sequence
  source: /note="Description of Artificial Sequence: Synthetic oligonucleotide"
  source: /note="Description of Combined DNA/RNA Molecule: Synthetic oligonucleotide"
  source: /note="DNA/RNA"
  source: /note="5' tri-ethylene glycol (TEG)"
  modified_base (3)..(3): 5-methyl modified nucleotide
  modified_base (15)..(15): 5-methyl modified nucleotide
  modified_base (16)..(16): bicyclic nucleic acid (BNA)
  modified_base (17)..(17): bicyclic nucleic acid (BNA)
aucaaggaagauggcat

SEQ ID NO: 19793 - RNA, 16 nt, Artificial Sequence
  source: /note="Description of Artificial Sequence: Synthetic oligonucleotide"
  source: /note="RNA"
  source: /note="5' tri-ethylene glycol (TEG)"
  modified_base (3)..(3): 5-methyl modified nucleotide
  modified_base (15)..(15): 5-methyl bicyclic nucleic acid
  modified_base (16)..(16): bicyclic nucleic acid (BNA)
aucaaggaagauggca

SEQ ID NO: 19794 - RNA, 15 nt, Artificial Sequence
  source: /note="Description of Artificial Sequence: Synthetic oligonucleotide"
  source: /note="RNA"
  source: /note="5' tri-ethylene glycol (TEG)"
  modified_base (3)..(3): 5-methyl modified nucleotide
  modified_base (14)..(14): bicyclic nucleic acid (BNA)
  modified_base (15)..(15): 5-methyl bicyclic nucleic acid
aucaaggaagauggc

SEQ ID NO: 19795 - RNA, 14 nt, Artificial Sequence
  source: /note="Description of Artificial Sequence: Synthetic oligonucleotide"
  source: /note="RNA"
  source: /note="5' tri-ethylene glycol (TEG)"
  modified_base (3)..(3): 5-methyl modified nucleotide
  modified_base (13)..(13): bicyclic nucleic acid (BNA)
  modified_base (14)..(14): bicyclic nucleic acid (BNA)
aucaaggaagaugg

SEQ ID NO: 19796 - DNA, 13 bp, Artificial Sequence
  source: /note="Description of Artificial Sequence: Synthetic oligonucleotide"
  source: /note="Description of Combined DNA/RNA Molecule: Synthetic oligonucleotide"
  source: /note="DNA/RNA"
  source: /note="5' tri-ethylene glycol (TEG)"
  modified_base (3)..(3): 5-methyl modified nucleotide
  modified_base (12)..(12): bicyclic nucleic acid (BNA)
  modified_base (13)..(13): bicyclic nucleic acid (BNA)
aucaaggaagatg

SEQ ID NO: 19797 - DNA, 12 bp, Artificial Sequence
  source: /note="Description of Artificial Sequence: Synthetic oligonucleotide"
  source: /note="Description of Combined DNA/RNA Molecule: Synthetic oligonucleotide"
  source: /note="DNA/RNA"
  source: /note="5' tri-ethylene glycol (TEG)"
  modified_base (3)..(3): 5-methyl modified nucleotide
  modified_base (11)..(11): bicyclic nucleic acid (BNA)
  modified_base (12)..(12): bicyclic nucleic acid (BNA)
aucaaggaagat

SEQ ID NO: 19798 - RNA, 11 nt, Artificial Sequence
  source: /note="Description of Artificial Sequence: Synthetic oligonucleotide"
  source: /note="RNA"
  source: /note="5' tri-ethylene glycol (TEG)"
  modified_base (3)..(3): 5-methyl modified nucleotide
  modified_base (10)..(10): bicyclic nucleic acid (BNA)
  modified_base (11)..(11): bicyclic nucleic acid (BNA)
aucaaggaaga

SEQ ID NO: 19799 - RNA, 10 nt, Artificial Sequence
  source: /note="Description of Artificial Sequence: Synthetic oligonucleotide"
  source: /note="RNA"
  source: /note="5' tri-ethylene glycol (TEG)"
  modified_base (3)..(3): 5-methyl modified nucleotide
  modified_base (9)..(9): bicyclic nucleic acid (BNA)
  modified_base (10)..(10): bicyclic nucleic acid (BNA)
aucaaggaag

SEQ ID NO: 19800 - DNA, 23 bp, Artificial Sequence
  source: /note="Description of Artificial Sequence: Synthetic oligonucleotide"
  source: /note="Description of Combined DNA/RNA Molecule: Synthetic oligonucleotide"
  source: /note="DNA/RNA"
  source: /note="5' tri-ethylene glycol (TEG)"
  modified_base (1)..(1): 5-methyl modified nucleotide
  modified_base (2)..(2): 5-methyl modified nucleotide
  modified_base (7)..(7): 5-methyl modified nucleotide
  modified_base (13)..(13): 5-methyl modified nucleotide
  modified_base (14)..(14): 5-methyl modified nucleotide
  modified_base (16)..(16): 5-methyl modified nucleotide
  modified_base (17)..(17): 5-methyl modified nucleotide
  modified_base (20)..(20): 5-methyl modified nucleotide
  modified_base (22)..(22): bicyclic nucleic acid (BNA)
  modified_base (23)..(23): 5-methyl bicyclic nucleic acid
ccagagcagguaccuccaacatc

SEQ ID NO: 19801 - RNA, 18 nt, Artificial Sequence
  source: /note="Description of Artificial Sequence: Synthetic oligonucleotide"
  source: /note="RNA"
  source: /note="5' tri-ethylene glycol (TEG)"
  modified_base (1)..(1): 5-methyl modified nucleotide
  modified_base (2)..(2): 5-methyl modified nucleotide
  modified_base (7)..(7): 5-methyl modified nucleotide
  modified_base (13)..(13): 5-methyl modified nucleotide
  modified_base (14)..(14): 5-methyl modified nucleotide
  modified_base (16)..(16): 5-methyl modified nucleotide
  modified_base (17)..(17): 5-methyl bicyclic nucleic acid
  modified_base (18)..(18): bicyclic nucleic acid (BNA)
ccagagcagguaccucca

SEQ ID NO: 19802 - DNA, 23 bp, Artificial Sequence
  source: /note="Description of Artificial Sequence: Synthetic oligonucleotide"
  source: /note="Description of Combined DNA/RNA Molecule: Synthetic oligonucleotide"
  source: /note="DNA/RNA"
  source: /note="5' tri-ethylene glycol (TEG)"
  modified_base (1)..(1): 5-methyl modified nucleotide
  modified_base (2)..(2): 5-methyl modified nucleotide
  modified_base (4)..(4): 5-methyl modified nucleotide
  modified_base (18)..(18): 5-methyl modified nucleotide
  modified_base (22)..(22): bicyclic nucleic acid (BNA)
  modified_base (23)..(23): bicyclic nucleic acid (BNA)
ccucugugauuuuauaacuugat

SEQ ID NO: 19803 - DNA, 17 bp, Artificial Sequence
  source: /note="Description of Artificial Sequence: Synthetic oligonucleotide"
  source: /note="Description of Combined DNA/RNA Molecule: Synthetic oligonucleotide"
  source: /note="DNA/RNA"
  source: /note="5' tri-ethylene glycol (TEG)"
  modified_base (2)..(2): 5-methyl modified nucleotide
  modified_base (4)..(4): 5-methyl modified nucleotide
  modified_base (5)..(5): 5-methyl modified nucleotide
  modified_base (6)..(6): 5-methyl modified nucleotide
  modified_base (8)..(8): 5-methyl modified nucleotide
  modified_base (9)..(9): 5-methyl modified nucleotide
  modified_base (12)..(12): 5-methyl modified nucleotide
  modified_base (14)..(14): 5-methyl modified nucleotide
  modified_base (15)..(15): 5-methyl modified nucleotide
  modified_base (16)..(16): 5-methyl bicyclic nucleic acid
  modified_base (17)..(17): bicyclic nucleic acid (BNA)
ucacccaccaucaccct

SEQ ID NO: 19804 - RNA, 20 nt, Artificial Sequence
  source: /note="Description of Artificial Sequence: Synthetic oligonucleotide"
  source: /note="RNA"
  source: /note="5' tri-ethylene glycol (TEG)"
  modified_base (7)..(7): 5-methyl modified nucleotide
  modified_base (8)..(8): 5-methyl modified nucleotide
  modified_base (10)..(10): 5-methyl modified nucleotide
  modified_base (16)..(16): 5-methyl modified nucleotide
  modified_base (18)..(18): 5-methyl modified nucleotide
  modified_base (19)..(19): 5-methyl bicyclic nucleic acid
  modified_base (20)..(20): 5-methyl bicyclic nucleic acid
ugauauccucaaggucaccc

SEQ ID NO: 19805 - DNA, 22 bp, Artificial Sequence
  source: /note="Description of Artificial Sequence: Synthetic oligonucleotide"
  source: /note="Description of Combined DNA/RNA Molecule: Synthetic oligonucleotide"
  source: /note="DNA/RNA"
  source: /note="5' tri-ethylene glycol (TEG)"
  modified_base (1)..(1): 5-methyl modified nucleotide
  modified_base (4)..(4): 5-methyl modified nucleotide
  modified_base (13)..(13): 5-methyl modified nucleotide
  modified_base (16)..(16): 5-methyl modified nucleotide
  modified_base (18)..(18): 5-methyl modified nucleotide
  modified_base (21)..(21): bicyclic nucleic acid (BNA)
  modified_base (22)..(22): bicyclic nucleic acid (BNA)
cugcuugaugaucaucucgutg

SEQ ID NO: 19806 - DNA, 18 bp, Artificial Sequence
  source: /note="Description of Artificial Sequence: Synthetic oligonucleotide"
  source: /note="Description of Combined DNA/RNA Molecule: Synthetic oligonucleotide"
  source: /note="DNA/RNA"
  source: /note="5' tri-ethylene glycol (TEG)"
  modified_base (1)..(1): 5-methyl modified nucleotide
  modified_base (4)..(4): 5-methyl modified nucleotide
  modified_base (13)..(13): 5-methyl modified nucleotide
  modified_base (16)..(16): 5-methyl modified nucleotide
  modified_base (17)..(17): bicyclic nucleic acid (BNA)
  modified_base (18)..(18): 5-methyl bicyclic nucleic acid
cugcuugaugaucauctc

SEQ ID NO: 19807 - RNA, 19 nt, Artificial Sequence
  source: /note="Description of Artificial Sequence: Synthetic oligonucleotide"
  source: /note="RNA"
  source: /note="5' tri-ethylene glycol (TEG)"
  modified_base (5)..(5): 5-methyl modified nucleotide
  modified_base (6)..(6): 5-methyl modified nucleotide
  modified_base (14)..(14): 5-methyl modified nucleotide
  modified_base (15)..(15): 5-methyl modified nucleotide
  modified_base (17)..(17): 5-methyl modified nucleotide
  modified_base (18)..(18): bicyclic nucleic acid (BNA)
  modified_base (19)..(19): bicyclic nucleic acid (BNA)
guuuccuuaguaaccacag

SEQ ID NO: 19808 - RNA, 17 nt, Artificial Sequence
  source: /note="Description of Artificial Sequence: Synthetic oligonucleotide"
  source: /note="RNA"
  source: /note="5' tri-ethylene glycol (TEG)"
  modified_base (5)..(5): 5-methyl modified nucleotide
  modified_base (6)..(6): 5-methyl modified nucleotide
  modified_base (14)..(14): 5-methyl modified nucleotide
  modified_base (15)..(15): 5-methyl modified nucleotide
  modified_base (16)..(16): bicyclic nucleic acid (BNA)
  modified_base (17)..(17): 5-methyl bicyclic nucleic acid
guuuccuuaguaaccac

SEQ ID NO: 19809 - DNA, 20 bp, Artificial Sequence
  source: /note="Description of Artificial Sequence: Synthetic oligonucleotide"
  source: /note="Description of Combined DNA/RNA Molecule: Synthetic oligonucleotide"
  source: /note="DNA/RNA"
  modified_base (2)..(2): 5-methyl modified nucleotide
  modified_base (14)..(14): 5-methyl modified nucleotide
  modified_base (19)..(19): 5-methyl bicyclic nucleic acid
  modified_base (20)..(20): bicyclic nucleic acid (BNA)
  source: /note="3' tri-ethylene glycol (TEG)"
ucaaggaagauggcauuuct

SEQ ID NO: 19810 - RNA, 22 nt, Artificial Sequence
  source: /note="Description of Artificial Sequence: Synthetic oligonucleotide"
  source: /note="RNA"
  modified_base (2)..(2): 5-methyl modified nucleotide
  modified_base (14)..(14): 5-methyl modified nucleotide
  modified_base (19)..(19): 5-methyl modified nucleotide
  modified_base (21)..(21): bicyclic nucleic acid (BNA)
  modified_base (22)..(22): bicyclic nucleic acid (BNA)
  source: /note="3' tri-ethylene glycol (TEG)"
ucaaggaagauggcauuucuag

SEQ ID NO: 19811 - RNA, 18 nt, Artificial Sequence
  source: /note="Description of Artificial Sequence: Synthetic oligonucleotide"
  source: /note="RNA"
  modified_base (9)..(9): 5-methyl modified nucleotide
  modified_base (13)..(13): 5-methyl modified nucleotide
  modified_base (14)..(14): 5-methyl modified nucleotide
  modified_base (17)..(17): bicyclic nucleic acid (BNA)
  modified_base (18)..(18): 5-methyl bicyclic nucleic acid
  source: /note="3' tri-ethylene glycol (TEG)"
gguaaguucuguccaagc

SEQ ID NO: 19812 - RNA, 18 nt, Artificial Sequence
  source: /note="Description of Artificial Sequence: Synthetic oligonucleotide"
  source: /note="RNA"
  modified_base (8)..(8): 5-methyl modified nucleotide
  modified_base (12)..(12): 5-methyl modified nucleotide
  modified_base (13)..(13): 5-methyl modified nucleotide
  modified_base (17)..(17): 5-methyl bicyclic nucleic acid
  modified_base (18)..(18): 5-methyl bicyclic nucleic acid
  source: /note="3' tri-ethylene glycol (TEG)"
guaaguucuguccaagcc

SEQ ID NO: 19813 - RNA, 18 nt, Artificial Sequence
  source: /note="Description of Artificial Sequence: Synthetic oligonucleotide"
  source: /note="RNA"
  modified_base (4)..(4): 5-methyl modified nucleotide
  modified_base (13)..(13): 5-methyl modified nucleotide
  modified_base (17)..(17): 5-methyl bicyclic nucleic acid
  modified_base (18)..(18): 5-methyl bicyclic nucleic acid
  source: /note="3' tri-ethylene glycol (TEG)"
agucgguaaguucugucc

SEQ ID NO: 19814 - RNA, 18 nt, Artificial Sequence
  source: /note="Description of Artificial Sequence: Synthetic oligonucleotide"
  source: /note="RNA"
  modified_base (1)..(1): 5-methyl modified nucleotide
  modified_base (5)..(5): 5-methyl modified nucleotide
  modified_base (6)..(6): 5-methyl modified nucleotide
  modified_base (10)..(10): 5-methyl modified nucleotide
  modified_base (11)..(11): 5-methyl modified nucleotide
  modified_base (12)..(12): 5-methyl modified nucleotide
  modified_base (17)..(17): bicyclic nucleic acid (BNA)
  modified_base (18)..(18): bicyclic nucleic acid (BNA)
  source: /note="3' tri-ethylene glycol (TEG)"
cuguccaagcccgguuga

SEQ ID NO: 19815 - RNA, 15 nt, Artificial Sequence
  source: /note="Description of Artificial Sequence: Synthetic oligonucleotide"
  source: /note="RNA"
  modified_base (7)..(7): 5-methyl modified nucleotide
  modified_base (11)..(11): 5-methyl modified nucleotide
  modified_base (12)..(12): 5-methyl modified nucleotide
  modified_base (14)..(14): bicyclic nucleic acid (BNA)
  modified_base (15)..(15): bicyclic nucleic acid (BNA)
  source: /note="3' tri-ethylene glycol (TEG)"
uaaguucuguccaag

SEQ ID NO: 19816 - RNA, 20 nt, Artificial Sequence
  source: /note="Description of Artificial Sequence: Synthetic oligonucleotide"
  source: /note="RNA"
  modified_base (3)..(3): 5-methyl modified nucleotide
  modified_base (7)..(7): 5-methyl modified nucleotide
  modified_base (8)..(8): 5-methyl modified nucleotide
  modified_base (12)..(12): 5-methyl modified nucleotide
  modified_base (13)..(13): 5-methyl modified nucleotide
  modified_base (14)..(14): 5-methyl modified nucleotide
  modified_base (19)..(19): bicyclic nucleic acid (BNA)
  modified_base (20)..(20): bicyclic nucleic acid (BNA)
  source: /note="3' tri-ethylene glycol (TEG)"
uucuguccaagcccgguuga

SEQ ID NO: 19817 - DNA, 19 bp, Artificial Sequence
  source: /note="Description of Artificial Sequence: Synthetic oligonucleotide"
  source: /note="Description of Combined DNA/RNA Molecule: Synthetic oligonucleotide"
  source: /note="DNA/RNA"
  modified_base (3)..(3): 5-methyl modified nucleotide
  modified_base (7)..(7): 5-methyl modified nucleotide
  modified_base (8)..(8): 5-methyl modified nucleotide
  modified_base (12)..(12): 5-methyl modified nucleotide
  modified_base (13)..(13): 5-methyl modified nucleotide
  modified_base (14)..(14): 5-methyl modified nucleotide
  modified_base (18)..(18): bicyclic nucleic acid (BNA)
  modified_base (19)..(19): bicyclic nucleic acid (BNA)
  source: /note="3' tri-ethylene glycol (TEG)"
uucuguccaagcccggutg

SEQ ID NO: 19818 - DNA, 18 bp, Artificial Sequence
  source: /note="Description of Artificial Sequence: Synthetic oligonucleotide"
  source: /note="Description of Combined DNA/RNA Molecule: Synthetic oligonucleotide"
  source: /note="DNA/RNA"
  modified_base (3)..(3): 5-methyl modified nucleotide
  modified_base (7)..(7): 5-methyl modified nucleotide
  modified_base (8)..(8): 5-methyl modified nucleotide
  modified_base (12)..(12): 5-methyl modified nucleotide
  modified_base (13)..(13): 5-methyl modified nucleotide
  modified_base (14)..(14): 5-methyl modified nucleotide
  modified_base (17)..(17): bicyclic nucleic acid (BNA)
  modified_base (18)..(18): bicyclic nucleic acid (BNA)
  source: /note="3' tri-ethylene glycol (TEG)"
uucuguccaagcccggtt

SEQ ID NO: 19819 - DNA, 17 bp, Artificial Sequence
  source: /note="Description of Artificial Sequence: Synthetic oligonucleotide"
  source: /note="Description of Combined DNA/RNA Molecule: Synthetic oligonucleotide"
  source: /note="DNA/RNA"
  modified_base (3)..(3): 5-methyl modified nucleotide
  modified_base (7)..(7): 5-methyl modified nucleotide
  modified_base (8)..(8): 5-methyl modified nucleotide
  modified_base (12)..(12): 5-methyl modified nucleotide
  modified_base (13)..(13): 5-methyl modified nucleotide
  modified_base (14)..(14): 5-methyl modified nucleotide
  modified_base (16)..(16): bicyclic nucleic acid (BNA)
  modified_base (17)..(17): bicyclic nucleic acid (BNA)
  source: /note="3' tri-ethylene glycol (TEG)"
uucuguccaagcccggt

SEQ ID NO: 19820 - RNA, 16 nt, Artificial Sequence
  source: /note="Description of Artificial Sequence: Synthetic oligonucleotide"
  source: /note="RNA"
  modified_base (3)..(3): 5-methyl modified nucleotide
  modified_base (7)..(7): 5-methyl modified nucleotide
  modified_base (8)..(8): 5-methyl modified nucleotide
  modified_base (12)..(12): 5-methyl modified nucleotide
  modified_base (13)..(13): 5-methyl modified nucleotide
  modified_base (14)..(14): 5-methyl modified nucleotide
  modified_base (15)..(15): bicyclic nucleic acid (BNA)
  modified_base (16)..(16): bicyclic nucleic acid (BNA)
  source: /note="3' tri-ethylene glycol (TEG)"
uucuguccaagcccgg

SEQ ID NO: 19821 - RNA, 15 nt, Artificial Sequence
  source: /note="Description of Artificial Sequence: Synthetic oligonucleotide"
  source: /note="RNA"
  modified_base (3)..(3): 5-methyl modified nucleotide
  modified_base (7)..(7): 5-methyl modified nucleotide
  modified_base (8)..(8): 5-methyl modified nucleotide
  modified_base (12)..(12): 5-methyl modified nucleotide
  modified_base (13)..(13): 5-methyl modified nucleotide
  modified_base (14)..(14): 5-methyl bicyclic nucleic acid
  modified_base (15)..(15): bicyclic nucleic acid (BNA)
  source: /note="3' tri-ethylene glycol (TEG)"
uucuguccaagcccg

SEQ ID NO: 19822 - RNA, 14 nt, Artificial Sequence
  source: /note="Description of Artificial Sequence: Synthetic oligonucleotide"
  source: /note="RNA"
  modified_base (3)..(3): 5-methyl modified nucleotide
  modified_base (7)..(7): 5-methyl modified nucleotide
  modified_base (8)..(8): 5-methyl modified nucleotide
  modified_base (12)..(12): 5-methyl modified nucleotide
  modified_base (13)..(13): 5-methyl bicyclic nucleic acid
  modified_base (14)..(14): 5-methyl bicyclic nucleic acid
  source: /note="3' tri-ethylene glycol (TEG)"
uucuguccaagccc

SEQ ID NO: 19823 - RNA, 13 nt, Artificial Sequence
  source: /note="Description of Artificial Sequence: Synthetic oligonucleotide"
  source: /note="RNA"
  modified_base (3)..(3): 5-methyl modified nucleotide
  modified_base (7)..(7): 5-methyl modified nucleotide
  modified_base (8)..(8): 5-methyl modified nucleotide
  modified_base (12)..(12): 5-methyl bicyclic nucleic acid
  modified_base (13)..(13): 5-methyl bicyclic nucleic acid
  source: /note="3' tri-ethylene glycol (TEG)"
uucuguccaagcc

SEQ ID NO: 19824 - RNA, 12 nt, Artificial Sequence
  source: /note="Description of Artificial Sequence: Synthetic oligonucleotide"
  source: /note="RNA"
  modified_base (3)..(3): 5-methyl modified nucleotide
  modified_base (7)..(7): 5-methyl modified nucleotide
  modified_base (8)..(8): 5-methyl modified nucleotide
  modified_base (11)..(11): bicyclic nucleic acid (BNA)
  modified_base (12)..(12): 5-methyl bicyclic nucleic acid
  source: /note="3' tri-ethylene glycol (TEG)"
uucuguccaagc

SEQ ID NO: 19825 - RNA, 11 nt, Artificial Sequence
  source: /note="Description of Artificial Sequence: Synthetic oligonucleotide"
  source: /note="RNA"
  modified_base (3)..(3): 5-methyl modified nucleotide
  modified_base (7)..(7): 5-methyl modified nucleotide
  modified_base (8)..(8): 5-methyl modified nucleotide
  modified_base (10)..(10): bicyclic nucleic acid (BNA)
  modified_base (11)..(11): bicyclic nucleic acid (BNA)
  source: /note="3' tri-ethylene glycol (TEG)"
uucuguccaag

SEQ ID NO: 19826 - RNA, 10 nt, Artificial Sequence
  source: /note="Description of Artificial Sequence: Synthetic oligonucleotide"
  source: /note="RNA"
  modified_base (3)..(3): 5-methyl modified nucleotide
  modified_base (7)..(7): 5-methyl modified nucleotide
  modified_base (8)..(8): 5-methyl modified nucleotide
  modified_base (9)..(9): bicyclic nucleic acid (BNA)
  modified_base (10)..(10): bicyclic nucleic acid (BNA)
  source: /note="3' tri-ethylene glycol (TEG)"
uucuguccaa

SEQ ID NO: 19827 - RNA, 9 nt, Artificial Sequence
  source: /note="Description of Artificial Sequence: Synthetic oligonucleotide"
  source: /note="RNA"
  modified_base (3)..(3): 5-methyl modified nucleotide
  modified_base (7)..(7): 5-methyl modified nucleotide
  modified_base (8)..(8): 5-methyl bicyclic nucleic acid
  modified_base (9)..(9): bicyclic nucleic acid (BNA)
  source: /note="3' tri-ethylene glycol (TEG)"
uucugucca

SEQ ID NO: 19828 - RNA, 8 nt, Artificial Sequence
  source: /note="Description of Artificial Sequence: Synthetic oligonucleotide"
  source: /note="RNA"
  modified_base (3)..(3): 5-methyl modified nucleotide
  modified_base (7)..(7): 5-methyl bicyclic nucleic acid
  modified_base (8)..(8): 5-methyl bicyclic nucleic acid
  source: /note="3' tri-ethylene glycol (TEG)"
uucugucc

SEQ ID NO: 19829 - RNA, 19 nt, Artificial Sequence
  source: /note="Description of Artificial Sequence: Synthetic oligonucleotide"
  source: /note="RNA"
  modified_base (2)..(2): 5-methyl modified nucleotide
  modified_base (6)..(6): 5-methyl modified nucleotide
  modified_base (7)..(7): 5-methyl modified nucleotide
  modified_base (11)..(11): 5-methyl modified nucleotide
  modified_base (12)..(12): 5-methyl modified nucleotide
  modified_base (13)..(13): 5-methyl modified nucleotide
  modified_base (18)..(18): bicyclic nucleic acid (BNA)
  modified_base (19)..(19): bicyclic nucleic acid (BNA)
  source: /note="3' tri-ethylene glycol (TEG)"
ucuguccaagcccgguuga

SEQ ID NO: 19830 - DNA, 18 bp, Artificial Sequence
  source: /note="Description of Artificial Sequence: Synthetic oligonucleotide"
  source: /note="Description of Combined DNA/RNA Molecule: Synthetic oligonucleotide"
  source: /note="DNA/RNA"
  modified_base (2)..(2): 5-methyl modified nucleotide
  modified_base (6)..(6): 5-methyl modified nucleotide
  modified_base (7)..(7): 5-methyl modified nucleotide
  modified_base (11)..(11): 5-methyl modified nucleotide
  modified_base (12)..(12): 5-methyl modified nucleotide
  modified_base (13)..(13): 5-methyl modified nucleotide
  modified_base (17)..(17): bicyclic nucleic acid (BNA)
  modified_base (18)..(18): bicyclic nucleic acid (BNA)
  source: /note="3' tri-ethylene glycol (TEG)"
ucuguccaagcccggutg

SEQ ID NO: 19831 - DNA, 17 bp, Artificial Sequence
  source: /note="Description of Artificial Sequence: Synthetic oligonucleotide"
  source: /note="Description of Combined DNA/RNA Molecule: Synthetic oligonucleotide"
  source: /note="DNA/RNA"
  modified_base (2)..(2): 5-methyl modified nucleotide
  modified_base (6)..(6): 5-methyl modified nucleotide
  modified_base (7)..(7): 5-methyl modified nucleotide
  modified_base (11)..(11): 5-methyl modified nucleotide
  modified_base (12)..(12): 5-methyl modified nucleotide
  modified_base (13)..(13): 5-methyl modified nucleotide
  modified_base (16)..(16): bicyclic nucleic acid (BNA)
  modified_base (17)..(17): bicyclic nucleic acid (BNA)
  source: /note="3' tri-ethylene glycol (TEG)"
ucuguccaagcccggtt

SEQ ID NO: 19832 - DNA, 16 bp, Artificial Sequence
  source: /note="Description of Artificial Sequence: Synthetic oligonucleotide"
  source: /note="Description of Combined DNA/RNA Molecule: Synthetic oligonucleotide"
  source: /note="DNA/RNA"
  modified_base (2)..(2): 5-methyl modified nucleotide
  modified_base (6)..(6): 5-methyl modified nucleotide
  modified_base (7)..(7): 5-methyl modified nucleotide
  modified_base (11)..(11): 5-methyl modified nucleotide
  modified_base (12)..(12): 5-methyl modified nucleotide
  modified_base (13)..(13): 5-methyl modified nucleotide
  modified_base (15)..(15): bicyclic nucleic acid (BNA)
  modified_base (16)..(16): bicyclic nucleic acid (BNA)
  source: /note="3' tri-ethylene glycol (TEG)"
ucuguccaagcccggt

SEQ ID NO: 19833 - RNA, 15 nt, Artificial Sequence
  source: /note="Description of Artificial Sequence: Synthetic oligonucleotide"
  source: /note="RNA"
  modified_base (2)..(2): 5-methyl modified nucleotide
  modified_base (6)..(6): 5-methyl modified nucleotide
  modified_base (7)..(7): 5-methyl modified nucleotide
  modified_base (11)..(11): 5-methyl modified nucleotide
  modified_base (12)..(12): 5-methyl modified nucleotide
  modified_base (13)..(13): 5-methyl modified nucleotide
  modified_base (14)..(14): bicyclic nucleic acid (BNA)
  modified_base (15)..(15): bicyclic nucleic acid (BNA)
  source: /note="3' tri-ethylene glycol (TEG)"
ucuguccaagcccgg

SEQ ID NO: 19834 - RNA, 14 nt, Artificial Sequence
  source: /note="Description of Artificial Sequence: Synthetic oligonucleotide"
  source: /note="RNA"
  modified_base (2)..(2): 5-methyl modified nucleotide
  modified_base (6)..(6): 5-methyl modified nucleotide
  modified_base (7)..(7): 5-methyl modified nucleotide
  modified_base (11)..(11): 5-methyl modified nucleotide
  modified_base (12)..(12): 5-methyl modified nucleotide
  modified_base (13)..(13): 5-methyl bicyclic nucleic acid
  modified_base (14)..(14): bicyclic nucleic acid (BNA)
  source: /note="3' tri-ethylene glycol (TEG)"
ucuguccaagcccg

SEQ ID NO: 19835 - RNA, 13 nt, Artificial Sequence
  source: /note="Description of Artificial Sequence: Synthetic oligonucleotide"
  source: /note="RNA"
  modified_base (2)..(2): 5-methyl modified nucleotide
  modified_base (6)..(6): 5-methyl modified nucleotide
  modified_base (7)..(7): 5-methyl modified nucleotide
  modified_base (11)..(11): 5-methyl modified nucleotide
  modified_base (12)..(12): 5-methyl bicyclic nucleic acid
  modified_base (13)..(13): 5-methyl bicyclic nucleic acid
  source: /note="3' tri-ethylene glycol (TEG)"
ucuguccaagccc

SEQ ID NO: 19836 - RNA, 12 nt, Artificial Sequence
  source: /note="Description of Artificial Sequence: Synthetic oligonucleotide"
  source: /note="RNA"
  modified_base (2)..(2): 5-methyl modified nucleotide
  modified_base (6)..(6): 5-methyl modified nucleotide
  modified_base (7)..(7): 5-methyl modified nucleotide
  modified_base (11)..(11): 5-methyl bicyclic nucleic acid
  modified_base (12)..(12): 5-methyl bicyclic nucleic acid
  source: /note="3' tri-ethylene glycol (TEG)"
ucuguccaagcc

SEQ ID NO: 19837 - RNA, 11 nt, Artificial Sequence
  source: /note="Description of Artificial Sequence: Synthetic oligonucleotide"
  source: /note="RNA"
  modified_base (2)..(2): 5-methyl modified nucleotide
  modified_base (6)..(6): 5-methyl modified nucleotide
  modified_base (7)..(7): 5-methyl modified nucleotide
  modified_base (10)..(10): bicyclic nucleic acid (BNA)
  modified_base (11)..(11): 5-methyl bicyclic nucleic acid
  source: /note="3' tri-ethylene glycol (TEG)"
ucuguccaagc

SEQ ID NO: 19838 - RNA, 10 nt, Artificial Sequence
  source: /note="Description of Artificial Sequence: Synthetic oligonucleotide"
  source: /note="RNA"
  modified_base (2)..(2): 5-methyl modified nucleotide
  modified_base (6)..(6): 5-methyl modified nucleotide
  modified_base (7)..(7): 5-methyl modified nucleotide
  modified_base (9)..(9): bicyclic nucleic acid (BNA)
  modified_base (10)..(10): bicyclic nucleic acid (BNA)
  source: /note="3' tri-ethylene glycol (TEG)"
ucuguccaag

SEQ ID NO: 19839 - RNA, 9 nt, Artificial Sequence
  source: /note="Description of Artificial Sequence: Synthetic oligonucleotide"
  source: /note="RNA"
  modified_base (2)..(2): 5-methyl modified nucleotide
  modified_base (6)..(6): 5-methyl modified nucleotide
  modified_base (7)..(7): 5-methyl modified nucleotide
  modified_base (8)..(8): bicyclic nucleic acid (BNA)
  modified_base (9)..(9): bicyclic nucleic acid (BNA)
  source: /note="3' tri-ethylene glycol (TEG)"
ucuguccaa

SEQ ID NO: 19840 - RNA, 8 nt, Artificial Sequence
  source: /note="Description of Artificial Sequence: Synthetic oligonucleotide"
  source: /note="RNA"
  modified_base (2)..(2): 5-methyl modified nucleotide
  modified_base (6)..(6): 5-methyl modified nucleotide
  modified_base (7)..(7): 5-methyl bicyclic nucleic acid
  modified_base (8)..(8): bicyclic nucleic acid (BNA)
  source: /note="3' tri-ethylene glycol (TEG)"
ucugucca

SEQ ID NO: 19841 - DNA, 17 bp, Artificial Sequence
  source: /note="Description of Artificial Sequence: Synthetic oligonucleotide"
  source: /note="Description of Combined DNA/RNA Molecule: Synthetic oligonucleotide"
  source: /note="DNA/RNA"
  modified_base (1)..(1): 5-methyl modified nucleotide
  modified_base (5)..(5): 5-methyl modified nucleotide
  modified_base (6)..(6): 5-methyl modified nucleotide
  modified_base (10)..(10): 5-methyl modified nucleotide
  modified_base (11)..(11): 5-methyl modified nucleotide
  modified_base (12)..(12): 5-methyl modified nucleotide
  modified_base (16)..(16): bicyclic nucleic acid (BNA)
  modified_base (17)..(17): bicyclic nucleic acid (BNA)
  source: /note="3' tri-ethylene glycol (TEG)"
cuguccaagcccggutg

SEQ ID NO: 19842 - DNA, 16 bp, Artificial Sequence
  source: /note="Description of Artificial Sequence: Synthetic oligonucleotide"
  source: /note="Description of Combined DNA/RNA Molecule: Synthetic oligonucleotide"
  source: /note="DNA/RNA"
  modified_base (1)..(1): 5-methyl modified nucleotide
  modified_base (5)..(5): 5-methyl modified nucleotide
  modified_base (6)..(6): 5-methyl modified nucleotide
  modified_base (10)..(10): 5-methyl modified nucleotide
  modified_base (11)..(11): 5-methyl modified nucleotide
  modified_base (12)..(12): 5-methyl modified nucleotide
  modified_base (15)..(15): bicyclic nucleic acid (BNA)
  modified_base (16)..(16): bicyclic nucleic acid (BNA)
  source: /note="3' tri-ethylene glycol (TEG)"
cuguccaagcccggtt

SEQ ID NO: 19843 - DNA, 15 bp, Artificial Sequence
  source: /note="Description of Artificial Sequence: Synthetic oligonucleotide"
  source: /note="Description of Combined DNA/RNA Molecule: Synthetic oligonucleotide"
  source: /note="DNA/RNA"
  modified_base (1)..(1): 5-methyl modified nucleotide
  modified_base (5)..(5): 5-methyl modified nucleotide
  modified_base (6)..(6): 5-methyl modified nucleotide
  modified_base (10)..(10): 5-methyl modified nucleotide
  modified_base (11)..(11): 5-methyl modified nucleotide
  modified_base (12)..(12): 5-methyl modified nucleotide
  modified_base (14)..(14): bicyclic nucleic acid (BNA)
  modified_base (15)..(15): bicyclic nucleic acid (BNA)
  source: /note="3' tri-ethylene glycol (TEG)"
cuguccaagcccggt

SEQ ID NO: 19844 - RNA, 14 nt, Artificial Sequence
  source: /note="Description of Artificial Sequence: Synthetic oligonucleotide"
  source: /note="RNA"
  modified_base (1)..(1): 5-methyl modified nucleotide
  modified_base (5)..(5): 5-methyl modified nucleotide
  modified_base (6)..(6): 5-methyl modified nucleotide
  modified_base (10)..(10): 5-methyl modified nucleotide
  modified_base (11)..(11): 5-methyl modified nucleotide
  modified_base (12)..(12): 5-methyl modified nucleotide
  modified_base (13)..(13): bicyclic nucleic acid (BNA)
  modified_base (14)..(14): bicyclic nucleic acid (BNA)
  source: /note="3' tri-ethylene glycol (TEG)"
cuguccaagcccgg

SEQ ID NO: 19845 - RNA, 13 nt, Artificial Sequence
  source: /note="Description of Artificial Sequence: Synthetic oligonucleotide"
  source: /note="RNA"
  modified_base (1)..(1): 5-methyl modified nucleotide
  modified_base (5)..(5): 5-methyl modified nucleotide
  modified_base (6)..(6): 5-methyl modified nucleotide
  modified_base (10)..(10): 5-methyl modified nucleotide
  modified_base (11)..(11): 5-methyl modified nucleotide
  modified_base (12)..(12): 5-methyl bicyclic nucleic acid
  modified_base (13)..(13): bicyclic nucleic acid (BNA)
  source: /note="3' tri-ethylene glycol (TEG)"
cuguccaagcccg

SEQ ID NO: 19846 - RNA, 12 nt, Artificial Sequence
  source: /note="Description of Artificial Sequence: Synthetic oligonucleotide"
  source: /note="RNA"
  modified_base (1)..(1): 5-methyl modified nucleotide
  modified_base (5)..(5): 5-methyl modified nucleotide
  modified_base (6)..(6): 5-methyl modified nucleotide
  modified_base (10)..(10): 5-methyl modified nucleotide
  modified_base (11)..(11): 5-methyl bicyclic nucleic acid
  modified_base (12)..(12): 5-methyl bicyclic nucleic acid
  source: /note="3' tri-ethylene glycol (TEG)"
cuguccaagccc

SEQ ID NO: 19847 - RNA, 11 nt, Artificial Sequence
  source: /note="Description of Artificial Sequence: Synthetic oligonucleotide"
  source: /note="RNA"
  modified_base (1)..(1): 5-methyl modified nucleotide
  modified_base (5)..(5): 5-methyl modified nucleotide
  modified_base (6)..(6): 5-methyl modified nucleotide
  modified_base (10)..(10): 5-methyl bicyclic nucleic acid
  modified_base (11)..(11): 5-methyl bicyclic nucleic acid
  source: /note="3' tri-ethylene glycol (TEG)"
cuguccaagcc

SEQ ID NO: 19848 - RNA, 10 nt, Artificial Sequence
  source: /note="Description of Artificial Sequence: Synthetic oligonucleotide"
  source: /note="RNA"
  modified_base (1)..(1): 5-methyl modified nucleotide
  modified_base (5)..(5): 5-methyl modified nucleotide
  modified_base (6)..(6): 5-methyl modified nucleotide
  modified_base (9)..(9): bicyclic nucleic acid (BNA)
  modified_base (10)..(10): 5-methyl bicyclic nucleic acid
  source: /note="3' tri-ethylene glycol (TEG)"
cuguccaagc

SEQ ID NO: 19849 - RNA, 9 nt, Artificial Sequence
  source: /note="Description of Artificial Sequence: Synthetic oligonucleotide"
  source: /note="RNA"
  modified_base (1)..(1): 5-methyl modified nucleotide
  modified_base (5)..(5): 5-methyl modified nucleotide
  modified_base (6)..(6): 5-methyl modified nucleotide
  modified_base (8)..(8): bicyclic nucleic acid (BNA)
  modified_base (9)..(9): bicyclic nucleic acid (BNA)
  source: /note="3' tri-ethylene glycol (TEG)"
cuguccaag

SEQ ID NO: 19850 - RNA, 8 nt, Artificial Sequence
  source: /note="Description of Artificial Sequence: Synthetic oligonucleotide"
  source: /note="RNA"
  modified_base (1)..(1): 5-methyl modified nucleotide
  modified_base (5)..(5): 5-methyl modified nucleotide
  modified_base (6)..(6): 5-methyl modified nucleotide
  modified_base (7)..(7): bicyclic nucleic acid (BNA)
  modified_base (8)..(8): bicyclic nucleic acid (BNA)
  source: /note="3' tri-ethylene glycol (TEG)"
cuguccaa

SEQ ID NO: 19851 - DNA, 20 bp, Artificial Sequence
  source: /note="Description of Artificial Sequence: Synthetic oligonucleotide"
  source: /note="Description of Combined DNA/RNA Molecule: Synthetic oligonucleotide"
  source: /note="DNA/RNA"
  modified_base (4)..(4): 5-methyl modified nucleotide
  modified_base (8)..(8): 5-methyl modified nucleotide
  modified_base (9)..(9): 5-methyl modified nucleotide
  modified_base (13)..(13): 5-methyl modified nucleotide
  modified_base (14)..(14): 5-methyl modified nucleotide
  modified_base (15)..(15): 5-methyl modified nucleotide
  modified_base (19)..(19): bicyclic nucleic acid (BNA)
  modified_base (20)..(20): bicyclic nucleic acid (BNA)
  source: /note="3' tri-ethylene glycol (TEG)"
guucuguccaagcccggutg

SEQ ID NO: 19852 - DNA, 19 bp, Artificial Sequence
  source: /note="Description of Artificial Sequence: Synthetic oligonucleotide"
  source: /note="Description of Combined DNA/RNA Molecule: Synthetic oligonucleotide"
  source: /note="DNA/RNA"
  modified_base (4)..(4): 5-methyl modified nucleotide
  modified_base (8)..(8): 5-methyl modified nucleotide
  modified_base (9)..(9): 5-methyl modified nucleotide
  modified_base (13)..(13): 5-methyl modified nucleotide
  modified_base (14)..(14): 5-methyl modified nucleotide
  modified_base (15)..(15): 5-methyl modified nucleotide
  modified_base (18)..(18): bicyclic nucleic acid (BNA)
  modified_base (19)..(19): bicyclic nucleic acid (BNA)
  source: /note="3' tri-ethylene glycol (TEG)"
guucuguccaagcccggtt

SEQ ID NO: 19853 - DNA, 18 bp, Artificial Sequence
  source: /note="Description of Artificial Sequence: Synthetic oligonucleotide"
  source: /note="Description of Combined DNA/RNA Molecule: Synthetic oligonucleotide"
  source: /note="DNA/RNA"
  modified_base (4)..(4): 5-methyl modified nucleotide
  modified_base (8)..(8): 5-methyl modified nucleotide
  modified_base (9)..(9): 5-methyl modified nucleotide
  modified_base (13)..(13): 5-methyl modified nucleotide
  modified_base (14)..(14): 5-methyl modified nucleotide
  modified_base (15)..(15): 5-methyl modified nucleotide
  modified_base (17)..(17): bicyclic nucleic acid (BNA)
  modified_base (18)..(18): bicyclic nucleic acid (BNA)
  source: /note="3' tri-ethylene glycol (TEG)"
guucuguccaagcccggt

SEQ ID NO: 19854 - RNA, 17 nt, Artificial Sequence
  source: /note="Description of Artificial Sequence: Synthetic oligonucleotide"
  source: /note="RNA"
  modified_base (4)..(4): 5-methyl modified nucleotide
  modified_base (8)..(8): 5-methyl modified nucleotide
  modified_base (9)..(9): 5-methyl modified nucleotide
  modified_base (13)..(13): 5-methyl modified nucleotide
  modified_base (14)..(14): 5-methyl modified nucleotide
  modified_base (15)..(15): 5-methyl modified nucleotide
  modified_base (16)..(16): bicyclic nucleic acid (BNA)
  modified_base (17)..(17): bicyclic nucleic acid (BNA)
  source: /note="3' tri-ethylene glycol (TEG)"
guucuguccaagcccgg

SEQ ID NO: 19855 - RNA, 16 nt, Artificial Sequence
  source: /note="Description of Artificial Sequence: Synthetic oligonucleotide"
  source: /note="RNA"
  modified_base (4)..(4): 5-methyl modified nucleotide
  modified_base (8)..(8): 5-methyl modified nucleotide
  modified_base (9)..(9): 5-methyl modified nucleotide
  modified_base (13)..(13): 5-methyl modified nucleotide
  modified_base (14)..(14): 5-methyl modified nucleotide
  modified_base (15)..(15): 5-methyl bicyclic nucleic acid
  modified_base (16)..(16): bicyclic nucleic acid (BNA)
  source: /note="3' tri-ethylene glycol (TEG)"
guucuguccaagcccg

SEQ ID NO: 19856 - RNA, 15 nt, Artificial Sequence
  source: /note="Description of Artificial Sequence: Synthetic oligonucleotide"
  source: /note="RNA"
  modified_base (4)..(4): 5-methyl modified nucleotide
  modified_base (8)..(8): 5-methyl modified nucleotide
  modified_base (9)..(9): 5-methyl modified nucleotide
  modified_base (13)..(13): 5-methyl modified nucleotide
  modified_base (14)..(14): 5-methyl bicyclic nucleic acid
  modified_base (15)..(15): 5-methyl bicyclic nucleic acid
  source: /note="3' tri-ethylene glycol (TEG)"
guucuguccaagccc

SEQ ID NO: 19857 - RNA, 14 nt, Artificial Sequence
  source: /note="Description of Artificial Sequence: Synthetic oligonucleotide"
  source: /note="RNA"
  modified_base (4)..(4): 5-methyl modified nucleotide
  modified_base (8)..(8): 5-methyl modified nucleotide
  modified_base (9)..(9): 5-methyl modified nucleotide
  modified_base (13)..(13): 5-methyl bicyclic nucleic acid
  modified_base (14)..(14): 5-methyl bicyclic nucleic acid
  source: /note="3' tri-ethylene glycol (TEG)"
guucuguccaagcc

SEQ ID NO: 19858 - RNA, 13 nt, Artificial Sequence
  source: /note="Description of Artificial Sequence: Synthetic oligonucleotide"
  source: /note="RNA"
  modified_base (4)..(4): 5-methyl modified nucleotide
  modified_base (8)..(8): 5-methyl modified nucleotide
  modified_base (9)..(9): 5-methyl modified nucleotide
  modified_base (12)..(12): bicyclic nucleic acid (BNA)
  modified_base (13)..(13): 5-methyl bicyclic nucleic acid
  source: /note="3' tri-ethylene glycol (TEG)"
guucuguccaagc

SEQ ID NO: 19859 - RNA, 12 nt, Artificial Sequence
  source: /note="Description of Artificial Sequence: Synthetic oligonucleotide"
  source: /note="RNA"
  modified_base (4)..(4): 5-methyl modified nucleotide
  modified_base (8)..(8): 5-methyl modified nucleotide
  modified_base (9)..(9): 5-methyl modified nucleotide
  modified_base (11)..(11): bicyclic nucleic acid (BNA)
  modified_base (12)..(12): bicyclic nucleic acid (BNA)
  source: /note="3' tri-ethylene glycol (TEG)"
guucuguccaag

SEQ ID NO: 19860 - RNA, 11 nt, Artificial Sequence
  source: /note="Description of Artificial Sequence: Synthetic oligonucleotide"
  source: /note="RNA"
  modified_base (4)..(4): 5-methyl modified nucleotide
  modified_base (8)..(8): 5-methyl modified nucleotide
  modified_base (9)..(9): 5-methyl modified nucleotide
  modified_base (10)..(10): bicyclic nucleic acid (BNA)
  modified_base (11)..(11): bicyclic nucleic acid (BNA)
  source: /note="3' tri-ethylene glycol (TEG)"
guucuguccaa

SEQ ID NO: 19861 - RNA, 10 nt, Artificial Sequence
  source: /note="Description of Artificial Sequence: Synthetic oligonucleotide"
  source: /note="RNA"
  modified_base (4)..(4): 5-methyl modified nucleotide
  modified_base (8)..(8): 5-methyl modified nucleotide
  modified_base (9)..(9): 5-methyl bicyclic nucleic acid
  modified_base (10)..(10): bicyclic nucleic acid (BNA)
  source: /note="3' tri-ethylene glycol (TEG)"
guucugucca

SEQ ID NO: 19862 - RNA, 9 nt, Artificial Sequence
  source: /note="Description of Artificial Sequence: Synthetic oligonucleotide"
  source: /note="RNA"
  modified_base (4)..(4): 5-methyl modified nucleotide
  modified_base (8)..(8): 5-methyl bicyclic nucleic acid
  modified_base (9)..(9): 5-methyl bicyclic nucleic acid
  source: /note="3' tri-ethylene glycol (TEG)"
guucugucc

SEQ ID NO: 19863 - DNA, 8 bp, Artificial Sequence
  source: /note="Description of Artificial Sequence: Synthetic oligonucleotide"
  source: /note="Description of Combined DNA/RNA Molecule: Synthetic oligonucleotide"
  source: /note="DNA/RNA"
  modified_base (4)..(4): 5-methyl modified nucleotide
  modified_base (7)..(7): bicyclic nucleic acid (BNA)
  modified_base (8)..(8): 5-methyl bicyclic nucleic acid
  source: /note="3' tri-ethylene glycol (TEG)"
guucugtc

SEQ ID NO: 19864 - DNA, 20 bp, Artificial Sequence
  source: /note="Description of Artificial Sequence: Synthetic oligonucleotide"
  source: /note="Description of Combined DNA/RNA Molecule: Synthetic oligonucleotide"
  source: /note="DNA/RNA"
  modified_base (5)..(5): 5-methyl modified nucleotide
  modified_base (9)..(9): 5-methyl modified nucleotide
  modified_base (10)..(10): 5-methyl modified nucleotide
  modified_base (14)..(14): 5-methyl modified nucleotide
  modified_base (15)..(15): 5-methyl modified nucleotide
  modified_base (16)..(16): 5-methyl modified nucleotide
  modified_base (19)..(19): bicyclic nucleic acid (BNA)
  modified_base (20)..(20): bicyclic nucleic acid (BNA)
  source: /note="3' tri-ethylene glycol (TEG)"
aguucuguccaagcccggtt

SEQ ID NO: 19865 - DNA, 19 bp, Artificial Sequence
  source: /note="Description of Artificial Sequence: Synthetic oligonucleotide"
  source: /note="Description of Combined DNA/RNA Molecule: Synthetic oligonucleotide"
  source: /note="DNA/RNA"
  modified_base (5)..(5): 5-methyl modified nucleotide
  modified_base (9)..(9): 5-methyl modified nucleotide
  modified_base (10)..(10): 5-methyl modified nucleotide
  modified_base (14)..(14): 5-methyl modified nucleotide
  modified_base (15)..(15): 5-methyl modified nucleotide
  modified_base (16)..(16): 5-methyl modified nucleotide
  modified_base (18)..(18): bicyclic nucleic acid (BNA)
  modified_base (19)..(19): bicyclic nucleic acid (BNA)
  source: /note="3' tri-ethylene glycol (TEG)"
aguucuguccaagcccggt

SEQ ID NO: 19866 - RNA, 18 nt, Artificial Sequence
  source: /note="Description of Artificial Sequence: Synthetic oligonucleotide"
  source: /note="RNA"
  modified_base (5)..(5): 5-methyl modified nucleotide
  modified_base (9)..(9): 5-methyl modified nucleotide
  modified_base (10)..(10): 5-methyl modified nucleotide
  modified_base (14)..(14): 5-methyl modified nucleotide
  modified_base (15)..(15): 5-methyl modified nucleotide
  modified_base (16)..(16): 5-methyl modified nucleotide
  modified_base (17)..(17): bicyclic nucleic acid (BNA)
  modified_base (18)..(18): bicyclic nucleic acid (BNA)
  source: /note="3' tri-ethylene glycol (TEG)"
aguucuguccaagcccgg

SEQ ID NO: 19867 - RNA, 17 nt, Artificial Sequence
  source: /note="Description of Artificial Sequence: Synthetic oligonucleotide"
  source: /note="RNA"
  modified_base (5)..(5): 5-methyl modified nucleotide
  modified_base (9)..(9): 5-methyl modified nucleotide
  modified_base (10)..(10): 5-methyl modified nucleotide
  modified_base (14)..(14): 5-methyl modified nucleotide
  modified_base (15)..(15): 5-methyl modified nucleotide
  modified_base (16)..(16): 5-methyl bicyclic nucleic acid
  modified_base (17)..(17): bicyclic nucleic acid (BNA)
  source: /note="3' tri-ethylene glycol (TEG)"
aguucuguccaagcccg

SEQ ID NO: 19868 - RNA, 16 nt, Artificial Sequence
  source: /note="Description of Artificial Sequence: Synthetic oligonucleotide"
  source: /note="RNA"
  modified_base (5)..(5): 5-methyl modified nucleotide
  modified_base (9)..(9): 5-methyl modified nucleotide
  modified_base (10)..(10): 5-methyl modified nucleotide
  modified_base (14)..(14): 5-methyl modified nucleotide
  modified_base (15)..(15): 5-methyl bicyclic nucleic acid
  modified_base (16)..(16): 5-methyl bicyclic nucleic acid
  source: /note="3' tri-ethylene glycol (TEG)"
aguucuguccaagccc

SEQ ID NO: 19869 - RNA, 15 nt, Artificial Sequence
  source: /note="Description of Artificial Sequence: Synthetic oligonucleotide"
  source: /note="RNA"
  modified_base (5)..(5): 5-methyl modified nucleotide
  modified_base (9)..(9): 5-methyl modified nucleotide
  modified_base (10)..(10): 5-methyl modified nucleotide
  modified_base (14)..(14): 5-methyl bicyclic nucleic acid
  modified_base (15)..(15): 5-methyl bicyclic nucleic acid
  source: /note="3' tri-ethylene glycol (TEG)"
aguucuguccaagcc

SEQ ID NO: 19870 - RNA, 14 nt, Artificial Sequence
  source: /note="Description of Artificial Sequence: Synthetic oligonucleotide"
  source: /note="RNA"
  modified_base (5)..(5): 5-methyl modified nucleotide
  modified_base (9)..(9): 5-methyl modified nucleotide
  modified_base (10)..(10): 5-methyl modified nucleotide
  modified_base (13)..(13): bicyclic nucleic acid (BNA)
  modified_base (14)..(14): 5-methyl bicyclic nucleic acid
  source: /note="3' tri-ethylene glycol (TEG)"
aguucuguccaagc

SEQ ID NO: 19871 - RNA, 13 nt, Artificial Sequence
  source: /note="Description of Artificial Sequence: Synthetic oligonucleotide"
  source: /note="RNA"
  modified_base (5)..(5): 5-methyl modified nucleotide
  modified_base (9)..(9): 5-methyl modified nucleotide
  modified_base (10)..(10): 5-methyl modified nucleotide
  modified_base (12)..(12): bicyclic nucleic acid (BNA)
  modified_base (13)..(13): bicyclic nucleic acid (BNA)
  source: /note="3' tri-ethylene glycol (TEG)"
aguucuguccaag

SEQ ID NO: 19872 - RNA, 12 nt, Artificial Sequence
  source: /note="Description of Artificial Sequence: Synthetic oligonucleotide"
  source: /note="RNA"
  modified_base (5)..(5): 5-methyl modified nucleotide
  modified_base (9)..(9): 5-methyl modified nucleotide
  modified_base (10)..(10): 5-methyl modified nucleotide
  modified_base (11)..(11): bicyclic nucleic acid (BNA)
  modified_base (12)..(12): bicyclic nucleic acid (BNA)
  source: /note="3' tri-ethylene glycol (TEG)"
aguucuguccaa

SEQ ID NO: 19873 - RNA, 11 nt, Artificial Sequence
  source: /note="Description of Artificial Sequence: Synthetic oligonucleotide"
  source: /note="RNA"
  modified_base (5)..(5): 5-methyl modified nucleotide
  modified_base (9)..(9): 5-methyl modified nucleotide
  modified_base (10)..(10): 5-methyl bicyclic nucleic acid
  modified_base (11)..(11): bicyclic nucleic acid (BNA)
  source: /note="3' tri-ethylene glycol (TEG)"
aguucugucca

SEQ ID NO: 19874 - RNA, 10 nt, Artificial Sequence
  source: /note="Description of Artificial Sequence: Synthetic oligonucleotide"
  source: /note="RNA"
  modified_base (5)..(5): 5-methyl modified nucleotide
  modified_base (9)..(9): 5-methyl bicyclic nucleic acid
  modified_base (10)..(10): 5-methyl bicyclic nucleic acid
  source: /note="3' tri-ethylene glycol (TEG)"
aguucugucc

SEQ ID NO: 19875 - DNA, 9 bp, Artificial Sequence
  source: /note="Description of Artificial Sequence: Synthetic oligonucleotide"
  source: /note="Description of Combined DNA/RNA Molecule: Synthetic oligonucleotide"
  source: /note="DNA/RNA"
  modified_base (5)..(5): 5-methyl modified nucleotide
  modified_base (8)..(8): bicyclic nucleic acid (BNA)
  modified_base (9)..(9): 5-methyl bicyclic nucleic acid
  source: /note="3' tri-ethylene glycol (TEG)"
aguucugtc

SEQ ID NO: 19876 - DNA, 8 bp, Artificial Sequence
  source: /note="Description of Artificial Sequence: Synthetic oligonucleotide"
  source: /note="Description of Combined DNA/RNA Molecule: Synthetic oligonucleotide"
  source: /note="DNA/RNA"
  modified_base (5)..(5): 5-methyl modified nucleotide
  modified_base (7)..(7): bicyclic nucleic acid (BNA)
  modified_base (8)..(8): bicyclic nucleic acid (BNA)
  source: /note="3' tri-ethylene glycol (TEG)"
aguucugt

SEQ ID NO: 19877 - DNA, 20 bp, Artificial Sequence
  source: /note="Description of Artificial Sequence: Synthetic oligonucleotide"
  source: /note="Description of Combined DNA/RNA Molecule: Synthetic oligonucleotide"
  source: /note="DNA/RNA"
  modified_base (6)..(6): 5-methyl modified nucleotide
  modified_base (10)..(10): 5-methyl modified nucleotide
  modified_base (11)..(11): 5-methyl modified nucleotide
  modified_base (15)..(15): 5-methyl modified nucleotide
  modified_base (16)..(16): 5-methyl modified nucleotide
  modified_base (17)..(17): 5-methyl modified nucleotide
  modified_base (19)..(19): bicyclic nucleic acid (BNA)
  modified_base (20)..(20): bicyclic nucleic acid (BNA)
  source: /note="3' tri-ethylene glycol (TEG)"
aaguucuguccaagcccggt

SEQ ID NO: 19878 - RNA, 19 nt, Artificial Sequence
  source: /note="Description of Artificial Sequence: Synthetic oligonucleotide"
  source: /note="RNA"
  modified_base (6)..(6): 5-methyl modified nucleotide
  modified_base (10)..(10): 5-methyl modified nucleotide
  modified_base (11)..(11): 5-methyl modified nucleotide
  modified_base (15)..(15): 5-methyl modified nucleotide
  modified_base (16)..(16): 5-methyl modified nucleotide
  modified_base (17)..(17): 5-methyl modified nucleotide
  modified_base (18)..(18): bicyclic nucleic acid (BNA)
  modified_base (19)..(19): bicyclic nucleic acid (BNA)
  source: /note="3' tri-ethylene glycol (TEG)"
aaguucuguccaagcccgg

SEQ ID NO: 19879 - RNA, 18 nt, Artificial Sequence
  source: /note="Description of Artificial Sequence: Synthetic oligonucleotide"
  source: /note="RNA"
  modified_base (6)..(6): 5-methyl modified nucleotide
  modified_base (10)..(10): 5-methyl modified nucleotide
  modified_base (11)..(11): 5-methyl modified nucleotide
  modified_base (15)..(15): 5-methyl modified nucleotide
  modified_base (16)..(16): 5-methyl modified nucleotide
  modified_base (17)..(17): 5-methyl bicyclic nucleic acid
  modified_base (18)..(18): bicyclic nucleic acid (BNA)
  source: /note="3' tri-ethylene glycol (TEG)"
aaguucuguccaagcccg

SEQ ID NO: 19880 - RNA, 17 nt, Artificial Sequence
  source: /note="Description of Artificial Sequence: Synthetic oligonucleotide"
  source: /note="RNA"
  modified_base (6)..(6): 5-methyl modified nucleotide
  modified_base (10)..(10): 5-methyl modified nucleotide
  modified_base (11)..(11): 5-methyl modified nucleotide
  modified_base (15)..(15): 5-methyl modified nucleotide
  modified_base (16)..(16): 5-methyl bicyclic nucleic acid
  modified_base (17)..(17): 5-methyl bicyclic nucleic acid
  source: /note="3' tri-ethylene glycol (TEG)"
aaguucuguccaagccc

SEQ ID NO: 19881 - RNA, 16 nt, Artificial Sequence
  source: /note="Description of Artificial Sequence: Synthetic oligonucleotide"
  source: /note="RNA"
  modified_base (6)..(6): 5-methyl modified nucleotide
  modified_base (10)..(10): 5-methyl modified nucleotide
  modified_base (11)..(11): 5-methyl modified nucleotide
  modified_base (15)..(15): 5-methyl bicyclic nucleic acid
  modified_base (16)..(16): 5-methyl bicyclic nucleic acid
  source: /note="3' tri-ethylene glycol (TEG)"
aaguucuguccaagcc

SEQ ID NO: 19882 - RNA, 15 nt, Artificial Sequence
  source: /note="Description of Artificial Sequence: Synthetic oligonucleotide"
  source: /note="RNA"
  modified_base (6)..(6): 5-methyl modified nucleotide
  modified_base (10)..(10): 5-methyl modified nucleotide
  modified_base (11)..(11): 5-methyl modified nucleotide
  modified_base (14)..(14): bicyclic nucleic acid (BNA)
  modified_base (15)..(15): 5-methyl bicyclic nucleic acid
  source: /note="3' tri-ethylene glycol (TEG)"
aaguucuguccaagc

SEQ ID NO: 19883 - RNA, 14 nt, Artificial Sequence
  source: /note="Description of Artificial Sequence: Synthetic oligonucleotide"
  source: /note="RNA"
  modified_base (6)..(6): 5-methyl modified nucleotide
  modified_base (10)..(10): 5-methyl modified nucleotide
  modified_base (11)..(11): 5-methyl modified nucleotide
  modified_base (13)..(13): bicyclic nucleic acid (BNA)
  modified_base (14)..(14): bicyclic nucleic acid (BNA)
  source: /note="3' tri-ethylene glycol (TEG)"
aaguucuguccaag

SEQ ID NO: 19884 - RNA, 13 nt, Artificial Sequence
  source: /note="Description of Artificial Sequence: Synthetic oligonucleotide"
  source: /note="RNA"
  modified_base (6)..(6): 5-methyl modified nucleotide
  modified_base (10)..(10): 5-methyl modified nucleotide
  modified_base (11)..(11): 5-methyl modified nucleotide
  modified_base (12)..(12): bicyclic nucleic acid (BNA)
  modified_base (13)..(13): bicyclic nucleic acid (BNA)
  source: /note="3' tri-ethylene glycol (TEG)"
aaguucuguccaa

SEQ ID NO: 19885 - RNA, 12 nt, Artificial Sequence
  source: /note="Description of Artificial Sequence: Synthetic oligonucleotide"
  source: /note="RNA"
  modified_base (6)..(6): 5-methyl modified nucleotide
  modified_base (10)..(10): 5-methyl modified nucleotide
  modified_base (11)..(11): 5-methyl bicyclic nucleic acid
  modified_base (12)..(12): bicyclic nucleic acid (BNA)
  source: /note="3' tri-ethylene glycol (TEG)"
aaguucugucca

SEQ ID NO: 19886 - RNA, 11 nt, Artificial Sequence
  source: /note="Description of Artificial Sequence: Synthetic oligonucleotide"
  source: /note="RNA"
  modified_base (6)..(6): 5-methyl modified nucleotide
  modified_base (10)..(10): 5-methyl bicyclic nucleic acid
  modified_base (11)..(11): 5-methyl bicyclic nucleic acid
  source: /note="3' tri-ethylene glycol (TEG)"
aaguucugucc

SEQ ID NO: 19887 - DNA, 10 bp, Artificial Sequence
  source: /note="Description of Artificial Sequence: Synthetic oligonucleotide"
  source: /note="Description of Combined DNA/RNA Molecule: Synthetic oligonucleotide"
  source: /note="DNA/RNA"
  modified_base (6)..(6): 5-methyl modified nucleotide
  modified_base (9)..(9): bicyclic nucleic acid (BNA)
  modified_base (10)..(10): 5-methyl bicyclic nucleic acid
  source: /note="3' tri-ethylene glycol (TEG)"
aaguucugtc

SEQ ID NO: 19888 - DNA, 9 bp, Artificial Sequence
  source: /note="Description of Artificial Sequence: Synthetic oligonucleotide"
  source: /note="Description of Combined DNA/RNA Molecule: Synthetic oligonucleotide"
  source: /note="DNA/RNA"
  modified_base (6)..(6): 5-methyl modified nucleotide
  modified_base (8)..(8): bicyclic nucleic acid (BNA)
  modified_base (9)..(9): bicyclic nucleic acid (BNA)
  source: /note="3' tri-ethylene glycol (TEG)"
aaguucugt

SEQ ID NO: 19889 - DNA, 8 bp, Artificial Sequence
  source: /note="Description of Artificial Sequence: Synthetic oligonucleotide"
  source: /note="Description of Combined DNA/RNA Molecule: Synthetic oligonucleotide"
  source: /note="DNA/RNA"
  modified_base (6)..(6): 5-methyl modified nucleotide
  modified_base (7)..(7): bicyclic nucleic acid (BNA)
  modified_base (8)..(8): bicyclic nucleic acid (BNA)
  source: /note="3' tri-ethylene glycol (TEG)"
aaguuctg

SEQ ID NO: 19890 - RNA, 20 nt, Artificial Sequence
  source: /note="Description of Artificial Sequence: Synthetic oligonucleotide"
  source: /note="RNA"
  modified_base (7)..(7): 5-methyl modified nucleotide
  modified_base (11)..(11): 5-methyl modified nucleotide
  modified_base (12)..(12): 5-methyl modified nucleotide
  modified_base (16)..(16): 5-methyl modified nucleotide
  modified_base (17)..(17): 5-methyl modified nucleotide
  modified_base (18)..(18): 5-methyl modified nucleotide
  modified_base (19)..(19): bicyclic nucleic acid (BNA)
  modified_base (20)..(20): bicyclic nucleic acid (BNA)
  source: /note="3' tri-ethylene glycol (TEG)"
uaaguucuguccaagcccgg

SEQ ID NO: 19891 - RNA, 19 nt, Artificial Sequence
  source: /note="Description of Artificial Sequence: Synthetic oligonucleotide"
  source: /note="RNA"
  modified_base (7)..(7): 5-methyl modified nucleotide
  modified_base (11)..(11): 5-methyl modified nucleotide
  modified_base (12)..(12): 5-methyl modified nucleotide
  modified_base (16)..(16): 5-methyl modified nucleotide
  modified_base (17)..(17): 5-methyl modified nucleotide
  modified_base (18)..(18): 5-methyl bicyclic nucleic acid
  modified_base (19)..(19): bicyclic nucleic acid (BNA)
  source: /note="3' tri-ethylene glycol (TEG)"
uaaguucuguccaagcccg

SEQ ID NO: 19892 - RNA, 18 nt, Artificial Sequence
  source: /note="Description of Artificial Sequence: Synthetic oligonucleotide"
  source: /note="RNA"
  modified_base (7)..(7): 5-methyl modified nucleotide
  modified_base (11)..(11): 5-methyl modified nucleotide
  modified_base (12)..(12): 5-methyl modified nucleotide
  modified_base (16)..(16): 5-methyl modified nucleotide
  modified_base (17)..(17): 5-methyl bicyclic nucleic acid
  modified_base (18)..(18): 5-methyl bicyclic nucleic acid
  source: /note="3' tri-ethylene glycol (TEG)"
uaaguucuguccaagccc

SEQ ID NO: 19893 - RNA, 17 nt, Artificial Sequence
  source: /note="Description of Artificial Sequence: Synthetic oligonucleotide"
  source: /note="RNA"
  modified_base (7)..(7): 5-methyl modified nucleotide
  modified_base (11)..(11): 5-methyl modified nucleotide
  modified_base (12)..(12): 5-methyl modified nucleotide
  modified_base (16)..(16): 5-methyl bicyclic nucleic acid
  modified_base (17)..(17): 5-methyl bicyclic nucleic acid
  source: /note="3' tri-ethylene glycol (TEG)"
uaaguucuguccaagcc

SEQ ID NO: 19894 - RNA, 16 nt, Artificial Sequence
  source: /note="Description of Artificial Sequence: Synthetic oligonucleotide"
  source: /note="RNA"
  modified_base (7)..(7): 5-methyl modified nucleotide
  modified_base (11)..(11): 5-methyl modified nucleotide
  modified_base (12)..(12): 5-methyl modified nucleotide
  modified_base (15)..(15): bicyclic nucleic acid (BNA)
  modified_base (16)..(16): 5-methyl bicyclic nucleic acid
  source: /note="3' tri-ethylene glycol (TEG)"
uaaguucuguccaagc

SEQ ID NO: 19895 - RNA, 14 nt, Artificial Sequence
  source: /note="Description of Artificial Sequence: Synthetic oligonucleotide"
  source: /note="RNA"
  modified_base (7)..(7): 5-methyl modified nucleotide
  modified_base (11)..(11): 5-methyl modified nucleotide
  modified_base (12)..(12): 5-methyl modified nucleotide
  modified_base (13)..(13): bicyclic nucleic acid (BNA)
  modified_base (14)..(14): bicyclic nucleic acid (BNA)
  source: /note="3' tri-ethylene glycol (TEG)"
uaaguucuguccaa

SEQ ID NO: 19896 - RNA, 13 nt, Artificial Sequence
  source: /note="Description of Artificial Sequence: Synthetic oligonucleotide"
  source: /note="RNA"
  modified_base (7)..(7): 5-methyl modified nucleotide
  modified_base (11)..(11): 5-methyl modified nucleotide
  modified_base (12)..(12): 5-methyl bicyclic nucleic acid
  modified_base (13)..(13): bicyclic nucleic acid (BNA)
  source: /note="3' tri-ethylene glycol (TEG)"
uaaguucugucca

SEQ ID NO: 19897 - RNA, 12 nt, Artificial Sequence
  source: /note="Description of Artificial Sequence: Synthetic oligonucleotide"
  source: /note="RNA"
  modified_base (7)..(7): 5-methyl modified nucleotide
  modified_base (11)..(11): 5-methyl bicyclic nucleic acid
  modified_base (12)..(12): 5-methyl bicyclic nucleic acid
  source: /note="3' tri-ethylene glycol (TEG)"
uaaguucugucc

SEQ ID NO: 19898 - DNA, 11 bp, Artificial Sequence
  source: /note="Description of Artificial Sequence: Synthetic oligonucleotide"
  source: /note="Description of Combined DNA/RNA Molecule: Synthetic oligonucleotide"
  source: /note="DNA/RNA"
  modified_base (7)..(7): 5-methyl modified nucleotide
  modified_base (10)..(10): bicyclic nucleic acid (BNA)
  modified_base (11)..(11): 5-methyl bicyclic nucleic acid
  source: /note="3' tri-ethylene glycol (TEG)"
uaaguucugtc

SEQ ID NO: 19899 - DNA, 10 bp, Artificial Sequence
  source: /note="Description of Artificial Sequence: Synthetic oligonucleotide"
  source: /note="Description of Combined DNA/RNA Molecule: Synthetic oligonucleotide"
  source: /note="DNA/RNA"
  modified_base (7)..(7): 5-methyl modified nucleotide
  modified_base (9)..(9): bicyclic nucleic acid (BNA)
  modified_base (10)..(10): bicyclic nucleic acid (BNA)
  source: /note="3' tri-ethylene glycol (TEG)"
uaaguucugt

SEQ ID NO: 19900 - DNA, 9 bp, Artificial Sequence
  source: /note="Description of Artificial Sequence: Synthetic oligonucleotide"
  source: /note="Description of Combined DNA/RNA Molecule: Synthetic oligonucleotide"
  source: /note="DNA/RNA"
  modified_base (7)..(7): 5-methyl modified nucleotide
  modified_base (8)..(8): bicyclic nucleic acid (BNA)
  modified_base (9)..(9): bicyclic nucleic acid (BNA)
  source: /note="3' tri-ethylene glycol (TEG)"
uaaguuctg

SEQ ID NO: 19901 - DNA, 8 bp, Artificial Sequence
  source: /note="Description of Artificial Sequence: Synthetic oligonucleotide"
  source: /note="Description of Combined DNA/RNA Molecule: Synthetic oligonucleotide"
  source: /note="DNA/RNA"
  modified_base (7)..(7): 5-methyl bicyclic nucleic acid
  modified_base (8)..(8): bicyclic nucleic acid (BNA)
  source: /note="3' tri-ethylene glycol (TEG)"
uaaguuct

SEQ ID NO: 19902 - RNA, 20 nt, Artificial Sequence
  source: /note="Description of Artificial Sequence: Synthetic oligonucleotide"
  source: /note="RNA"
  modified_base (8)..(8): 5-methyl modified nucleotide
  modified_base (12)..(12): 5-methyl modified nucleotide
  modified_base (13)..(13): 5-methyl modified nucleotide
  modified_base (17)..(17): 5-methyl modified nucleotide
  modified_base (18)..(18): 5-methyl modified nucleotide
  modified_base (19)..(19): 5-methyl bicyclic nucleic acid
  modified_base (20)..(20): bicyclic nucleic acid (BNA)
  source: /note="3' tri-ethylene glycol (TEG)"
guaaguucuguccaagcccg

SEQ ID NO: 19903 - RNA, 19 nt, Artificial Sequence
  source: /note="Description of Artificial Sequence: Synthetic oligonucleotide"
  source: /note="RNA"
  modified_base (8)..(8): 5-methyl modified nucleotide
  modified_base (12)..(12): 5-methyl modified nucleotide
  modified_base (13)..(13): 5-methyl modified nucleotide
  modified_base (17)..(17): 5-methyl modified nucleotide
  modified_base (18)..(18): 5-methyl bicyclic nucleic acid
  modified_base (19)..(19): 5-methyl bicyclic nucleic acid
  source: /note="3' tri-ethylene glycol (TEG)"
guaaguucuguccaagccc

SEQ ID NO: 19904 - RNA, 17 nt, Artificial Sequence
  source: /note="Description of Artificial Sequence: Synthetic oligonucleotide"
  source: /note="RNA"
  modified_base (8)..(8): 5-methyl modified nucleotide
  modified_base (12)..(12): 5-methyl modified nucleotide
  modified_base (13)..(13): 5-methyl modified nucleotide
  modified_base (16)..(16): bicyclic nucleic acid (BNA)
  modified_base (17)..(17): 5-methyl bicyclic nucleic acid
  source: /note="3' tri-ethylene glycol (TEG)"
guaaguucuguccaagc

SEQ ID NO: 19905 - RNA, 16 nt, Artificial Sequence
  source: /note="Description of Artificial Sequence: Synthetic oligonucleotide"
  source: /note="RNA"
  modified_base (8)..(8): 5-methyl modified nucleotide
  modified_base (12)..(12): 5-methyl modified nucleotide
  modified_base (13)..(13): 5-methyl modified nucleotide
  modified_base (15)..(15): bicyclic nucleic acid (BNA)
  modified_base (16)..(16): bicyclic nucleic acid (BNA)
  source: /note="3' tri-ethylene glycol (TEG)"
guaaguucuguccaag

SEQ ID NO: 19906 - RNA, 15 nt, Artificial Sequence
  source: /note="Description of Artificial Sequence: Synthetic oligonucleotide"
  source: /note="RNA"
  modified_base (8)..(8): 5-methyl modified nucleotide
  modified_base (12)..(12): 5-methyl modified nucleotide
  modified_base (13)..(13): 5-methyl modified nucleotide
  modified_base (14)..(14): bicyclic nucleic acid (BNA)
  modified_base (15)..(15): bicyclic nucleic acid (BNA)
  source: /note="3' tri-ethylene glycol (TEG)"
guaaguucuguccaa

SEQ ID NO: 19907 - RNA, 14 nt, Artificial Sequence
  source: /note="Description of Artificial Sequence: Synthetic oligonucleotide"
  source: /note="RNA"
  modified_base (8)..(8): 5-methyl modified nucleotide
  modified_base (12)..(12): 5-methyl modified nucleotide
  modified_base (13)..(13): 5-methyl bicyclic nucleic acid
  modified_base (14)..(14): bicyclic nucleic acid (BNA)
  source: /note="3' tri-ethylene glycol (TEG)"
guaaguucugucca

SEQ ID NO: 19908 - RNA, 13 nt, Artificial Sequence
  source: /note="Description of Artificial Sequence: Synthetic oligonucleotide"
  source: /note="RNA"
  modified_base (8)..(8): 5-methyl modified nucleotide
  modified_base (12)..(12): 5-methyl bicyclic nucleic acid
  modified_base (13)..(13): 5-methyl bicyclic nucleic acid
  source: /note="3' tri-ethylene glycol (TEG)"
guaaguucugucc

SEQ ID NO: 19909 - DNA, 12 bp, Artificial Sequence
  source: /note="Description of Artificial Sequence: Synthetic oligonucleotide"
  source: /note="Description of Combined DNA/RNA Molecule: Synthetic oligonucleotide"
  source: /note="DNA/RNA"
  modified_base (8)..(8): 5-methyl modified nucleotide
  modified_base (11)..(11): bicyclic nucleic acid (BNA)
  modified_base (12)..(12): 5-methyl bicyclic nucleic acid
  source: /note="3' tri-ethylene glycol (TEG)"
guaaguucugtc

SEQ ID NO: 19910 - DNA, 11 bp, Artificial Sequence
  source: /note="Description of Artificial Sequence: Synthetic oligonucleotide"
  source: /note="Description of Combined DNA/RNA Molecule: Synthetic oligonucleotide"
  source: /note="DNA/RNA"
  modified_base (8)..(8): 5-methyl modified nucleotide
  modified_base (10)..(10): bicyclic nucleic acid (BNA)
  modified_base (11)..(11): bicyclic nucleic acid (BNA)
  source: /note="3' tri-ethylene glycol (TEG)"
guaaguucugt

SEQ ID NO: 19911 - DNA, 10 bp, Artificial Sequence
  source: /note="Description of Artificial Sequence: Synthetic oligonucleotide"
  source: /note="Description of Combined DNA/RNA Molecule: Synthetic oligonucleotide"
  source: /note="DNA/RNA"
  modified_base (8)..(8): 5-methyl modified nucleotide
  modified_base (9)..(9): bicyclic nucleic acid (BNA)
  modified_base (10)..(10): bicyclic nucleic acid (BNA)
  source: /note="3' tri-ethylene glycol (TEG)"
guaaguuctg

SEQ ID NO: 19912 - DNA, 9 bp, Artificial Sequence
  source: /note="Description of Artificial Sequence: Synthetic oligonucleotide"
  source: /note="Description of Combined DNA/RNA Molecule: Synthetic oligonucleotide"
  source: /note="DNA/RNA"
  modified_base (8)..(8): 5-methyl bicyclic nucleic acid
  modified_base (9)..(9): bicyclic nucleic acid (BNA)
  source: /note="3' tri-ethylene glycol (TEG)"
guaaguuct

SEQ ID NO: 19913 - DNA, 8 bp, Artificial Sequence
  source: /note="Description of Artificial Sequence: Synthetic oligonucleotide"
  source: /note="Description of Combined DNA/RNA Molecule: Synthetic oligonucleotide"
  source: /note="DNA/RNA"
  modified_base (7)..(7): bicyclic nucleic acid (BNA)
  modified_base (8)..(8): 5-methyl bicyclic nucleic acid
  source: /note="3' tri-ethylene glycol (TEG)"
guaagutc

SEQ ID NO: 19914 - RNA, 20 nt, Artificial Sequence
  source: /note="Description of Artificial Sequence: Synthetic oligonucleotide"
  source: /note="RNA"
  modified_base (9)..(9): 5-methyl modified nucleotide
  modified_base (13)..(13): 5-methyl modified nucleotide
  modified_base (14)..(14): 5-methyl modified nucleotide
  modified_base (18)..(18): 5-methyl modified nucleotide
  modified_base (19)..(19): 5-methyl bicyclic nucleic acid
  modified_base (20)..(20): 5-methyl bicyclic nucleic acid
  source: /note="3' tri-ethylene glycol (TEG)"
gguaaguucuguccaagccc

SEQ ID NO: 19915 - RNA, 19 nt, Artificial Sequence
  source: /note="Description of Artificial Sequence: Synthetic oligonucleotide"
  source: /note="RNA"
  modified_base (9)..(9): 5-methyl modified nucleotide
  modified_base (13)..(13): 5-methyl modified nucleotide
  modified_base (14)..(14): 5-methyl modified nucleotide
  modified_base (18)..(18): 5-methyl bicyclic nucleic acid
  modified_base (19)..(19): 5-methyl bicyclic nucleic acid
  source: /note="3' tri-ethylene glycol (TEG)"
gguaaguucuguccaagcc

SEQ ID NO: 19916 - RNA, 17 nt, Artificial Sequence
  source: /note="Description of Artificial Sequence: Synthetic oligonucleotide"
  source: /note="RNA"
  modified_base (9)..(9): 5-methyl modified nucleotide
  modified_base (13)..(13): 5-methyl modified nucleotide
  modified_base (14)..(14): 5-methyl modified nucleotide
  modified_base (16)..(16): bicyclic nucleic acid (BNA)
  modified_base (17)..(17): bicyclic nucleic acid (BNA)
  source: /note="3' tri-ethylene glycol (TEG)"
gguaaguucuguccaag

SEQ ID NO: 19917 - RNA, 16 nt, Artificial Sequence
  source: /note="Description of Artificial Sequence: Synthetic oligonucleotide"
  source: /note="RNA"
  modified_base (9)..(9): 5-methyl modified nucleotide
  modified_base (13)..(13): 5-methyl modified nucleotide
  modified_base (14)..(14): 5-methyl modified nucleotide
  modified_base (15)..(15): bicyclic nucleic acid (BNA)
  modified_base (16)..(16): bicyclic nucleic acid (BNA)
  source: /note="3' tri-ethylene glycol (TEG)"
gguaaguucuguccaa

SEQ ID NO: 19918 - RNA, 15 nt, Artificial Sequence
  source: /note="Description of Artificial Sequence: Synthetic oligonucleotide"
  source: /note="RNA"
  modified_base (9)..(9): 5-methyl modified nucleotide
  modified_base (13)..(13): 5-methyl modified nucleotide
  modified_base (14)..(14): 5-methyl bicyclic nucleic acid
  modified_base (15)..(15): bicyclic nucleic acid (BNA)
  source: /note="3' tri-ethylene glycol (TEG)"
gguaaguucugucca

SEQ ID NO: 19919 - RNA, 14 nt, Artificial Sequence
  source: /note="Description of Artificial Sequence: Synthetic oligonucleotide"
  source: /note="RNA"
  modified_base (9)..(9): 5-methyl modified nucleotide
  modified_base (13)..(13): 5-methyl bicyclic nucleic acid
  modified_base (14)..(14): 5-methyl bicyclic nucleic acid
  source: /note="3' tri-ethylene glycol (TEG)"
gguaaguucugucc

SEQ ID NO: 19920 - DNA, 13 bp, Artificial Sequence
  source: /note="Description of Artificial Sequence: Synthetic oligonucleotide"
  source: /note="Description of Combined DNA/RNA Molecule: Synthetic oligonucleotide"
  source: /note="DNA/RNA"
  modified_base (9)..(9): 5-methyl modified nucleotide
  modified_base (12)..(12): bicyclic nucleic acid (BNA)
  modified_base (13)..(13): 5-methyl bicyclic nucleic acid
  source: /note="3' tri-ethylene glycol (TEG)"
gguaaguucugtc

SEQ ID NO: 19921 - DNA, 12 bp, Artificial Sequence
  source: /note="Description of Artificial Sequence: Synthetic oligonucleotide"
  source: /note="Description of Combined DNA/RNA Molecule: Synthetic oligonucleotide"
  source: /note="DNA/RNA"
  modified_base (9)..(9): 5-methyl modified nucleotide
  modified_base (11)..(11): bicyclic nucleic acid (BNA)
  modified_base (12)..(12): bicyclic nucleic acid (BNA)
  source: /note="3' tri-ethylene glycol (TEG)"
gguaaguucugt

SEQ ID NO: 19922 - DNA, 11 bp, Artificial Sequence
  source: /note="Description of Artificial Sequence: Synthetic oligonucleotide"
  source: /note="Description of Combined DNA/RNA Molecule: Synthetic oligonucleotide"
  source: /note="DNA/RNA"
  modified_base (9)..(9): 5-methyl modified nucleotide
  modified_base (10)..(10): bicyclic nucleic acid (BNA)
  modified_base (11)..(11): bicyclic nucleic acid (BNA)
  source: /note="3' tri-ethylene glycol (TEG)"
gguaaguuctg

SEQ ID NO: 19923 - DNA, 10 bp, Artificial Sequence
  source: /note="Description of Artificial Sequence: Synthetic oligonucleotide"
  source: /note="Description of Combined DNA/RNA Molecule: Synthetic oligonucleotide"
  source: /note="DNA/RNA"
  modified_base (9)..(9): 5-methyl bicyclic nucleic acid
  modified_base (10)..(10): bicyclic nucleic acid (BNA)
  source: /note="3' tri-ethylene glycol (TEG)"
gguaaguuct

SEQ ID NO: 19924 - DNA, 9 bp, Artificial Sequence
  source: /note="Description of Artificial Sequence: Synthetic oligonucleotide"
  source: /note="Description of Combined DNA/RNA Molecule: Synthetic oligonucleotide"
  source: /note="DNA/RNA"
  modified_base (8)..(8): bicyclic nucleic acid (BNA)
  modified_base (9)..(9): 5-methyl bicyclic nucleic acid
  source: /note="3' tri-ethylene glycol (TEG)"
gguaagutc

SEQ ID NO: 19925 - DNA, 8 bp, Artificial Sequence
  source: /note="Description of Artificial Sequence: Synthetic oligonucleotide"
  source: /note="Description of Combined DNA/RNA Molecule: Synthetic oligonucleotide"
  source: /note="DNA/RNA"
  modified_base (7)..(7): bicyclic nucleic acid (BNA)
  modified_base (8)..(8): bicyclic nucleic acid (BNA)
  source: /note="3' tri-ethylene glycol (TEG)"
gguaagtt

SEQ ID NO: 19926 - RNA, 20 nt, Artificial Sequence
  source: /note="Description of Artificial Sequence: Synthetic oligonucleotide"
  source: /note="RNA"
  modified_base (1)..(1): 5-methyl modified nucleotide
  modified_base (10)..(10): 5-methyl modified nucleotide
  modified_base (14)..(14): 5-methyl modified nucleotide
  modified_base (15)..(15): 5-methyl modified nucleotide
  modified_base (19)..(19): 5-methyl bicyclic nucleic acid
  modified_base (20)..(20): 5-methyl bicyclic nucleic acid
  source: /note="3' tri-ethylene glycol (TEG)"
cgguaaguucuguccaagcc

SEQ ID NO: 19927 - RNA, 19 nt, Artificial Sequence
  source: /note="Description of Artificial Sequence: Synthetic oligonucleotide"
  source: /note="RNA"
  modified_base (1)..(1): 5-methyl modified nucleotide
  modified_base (10)..(10): 5-methyl modified nucleotide
  modified_base (14)..(14): 5-methyl modified nucleotide
  modified_base (15)..(15): 5-methyl modified nucleotide
  modified_base (18)..(18): bicyclic nucleic acid (BNA)
  modified_base (19)..(19): 5-methyl bicyclic nucleic acid
  source: /note="3' tri-ethylene glycol (TEG)"
cgguaaguucuguccaagc

SEQ ID NO: 19928 - RNA, 18 nt, Artificial Sequence
  source: /note="Description of Artificial Sequence: Synthetic oligonucleotide"
  source: /note="RNA"
  modified_base (1)..(1): 5-methyl modified nucleotide
  modified_base (10)..(10): 5-methyl modified nucleotide
  modified_base (14)..(14): 5-methyl modified nucleotide
  modified_base (15)..(15): 5-methyl modified nucleotide
  modified_base (17)..(17): bicyclic nucleic acid (BNA)
  modified_base (18)..(18): bicyclic nucleic acid (BNA)
  source: /note="3' tri-ethylene glycol (TEG)"
cgguaaguucuguccaag

SEQ ID NO: 19929 - RNA, 17 nt, Artificial Sequence
  source: /note="Description of Artificial Sequence: Synthetic oligonucleotide"
  source: /note="RNA"
  modified_base (1)..(1): 5-methyl modified nucleotide
  modified_base (10)..(10): 5-methyl modified nucleotide
  modified_base (14)..(14): 5-methyl modified nucleotide
  modified_base (15)..(15): 5-methyl modified nucleotide
  modified_base (16)..(16): bicyclic nucleic acid (BNA)
  modified_base (17)..(17): bicyclic nucleic acid (BNA)
  source: /note="3' tri-ethylene glycol (TEG)"
cgguaaguucuguccaa

SEQ ID NO: 19930 - RNA, 16 nt, Artificial Sequence
  source: /note="Description of Artificial Sequence: Synthetic oligonucleotide"
  source: /note="RNA"
  modified_base (1)..(1): 5-methyl modified nucleotide
  modified_base (10)..(10): 5-methyl modified nucleotide
  modified_base (14)..(14): 5-methyl modified nucleotide
  modified_base (15)..(15): 5-methyl bicyclic nucleic acid
  modified_base (16)..(16): bicyclic nucleic acid (BNA)
  source: /note="3' tri-ethylene glycol (TEG)"
cgguaaguucugucca

SEQ ID NO: 19931 - RNA, 15 nt, Artificial Sequence
  source: /note="Description of Artificial Sequence: Synthetic oligonucleotide"
  source: /note="RNA"
  modified_base (1)..(1): 5-methyl modified nucleotide
  modified_base (10)..(10): 5-methyl modified nucleotide
  modified_base (14)..(14): 5-methyl bicyclic nucleic acid
  modified_base (15)..(15): 5-methyl bicyclic nucleic acid
  source: /note="3' tri-ethylene glycol (TEG)"
cgguaaguucugucc

SEQ ID NO: 19932 - DNA, 14 bp, Artificial Sequence
  source: /note="Description of Artificial Sequence: Synthetic oligonucleotide"
  source: /note="Description of Combined DNA/RNA Molecule: Synthetic oligonucleotide"
  source: /note="DNA/RNA"
  modified_base (1)..(1): 5-methyl modified nucleotide
  modified_base (10)..(10): 5-methyl modified nucleotide
  modified_base (13)..(13): bicyclic nucleic acid (BNA)
  modified_base (14)..(14): 5-methyl bicyclic nucleic acid
  source: /note="3' tri-ethylene glycol (TEG)"
cgguaaguucugtc

SEQ ID NO: 19933 - DNA, 13 bp, Artificial Sequence
  source: /note="Description of Artificial Sequence: Synthetic oligonucleotide"
  source: /note="Description of Combined DNA/RNA Molecule: Synthetic oligonucleotide"
  source: /note="DNA/RNA"
  modified_base (1)..(1): 5-methyl modified nucleotide
  modified_base (10)..(10): 5-methyl modified nucleotide
  modified_base (12)..(12): bicyclic nucleic acid (BNA)
  modified_base (13)..(13): bicyclic nucleic acid (BNA)
  source: /note="3' tri-ethylene glycol (TEG)"
cgguaaguucugt

SEQ ID NO: 19934 - DNA, 12 bp, Artificial Sequence
  source: /note="Description of Artificial Sequence: Synthetic oligonucleotide"
  source: /note="Description of Combined DNA/RNA Molecule: Synthetic oligonucleotide"
  source: /note="DNA/RNA"
  modified_base (1)..(1): 5-methyl modified nucleotide
  modified_base (10)..(10): 5-methyl modified nucleotide
  modified_base (11)..(11): bicyclic nucleic acid (BNA)
  modified_base (12)..(12): bicyclic nucleic acid (BNA)
  source: /note="3' tri-ethylene glycol (TEG)"
cgguaaguuctg

SEQ ID NO: 19935 - DNA, 11 bp, Artificial Sequence
  source: /note="Description of Artificial Sequence: Synthetic oligonucleotide"
  source: /note="Description of Combined DNA/RNA Molecule: Synthetic oligonucleotide"
  source: /note="DNA/RNA"
  modified_base (1)..(1): 5-methyl modified nucleotide
  modified_base (10)..(10): 5-methyl bicyclic nucleic acid
  modified_base (11)..(11): bicyclic nucleic acid (BNA)
  source: /note="3' tri-ethylene glycol (TEG)"
cgguaaguuct

SEQ ID NO: 19936 - DNA, 10 bp, Artificial Sequence
  source: /note="Description of Artificial Sequence: Synthetic oligonucleotide"
  source: /note="Description of Combined DNA/RNA Molecule: Synthetic oligonucleotide"
  source: /note="DNA/RNA"
  modified_base (1)..(1): 5-methyl modified nucleotide
  modified_base (9)..(9): bicyclic nucleic acid (BNA)
  modified_base (10)..(10): 5-methyl bicyclic nucleic acid
  source: /note="3' tri-ethylene glycol (TEG)"
cgguaagutc

SEQ ID NO: 19937 - DNA, 9 bp, Artificial Sequence
  source: /note="Description of Artificial Sequence: Synthetic oligonucleotide"
  source: /note="Description of Combined DNA/RNA Molecule: Synthetic oligonucleotide"
  source: /note="DNA/RNA"
  modified_base (1)..(1): 5-methyl modified nucleotide
  modified_base (8)..(8): bicyclic nucleic acid (BNA)
  modified_base (9)..(9): bicyclic nucleic acid (BNA)
  source: /note="3' tri-ethylene glycol (TEG)"
cgguaagtt

SEQ ID NO: 19938 - DNA, 8 bp, Artificial Sequence
  source: /note="Description of Artificial Sequence: Synthetic oligonucleotide"
  source: /note="Description of Combined DNA/RNA Molecule: Synthetic oligonucleotide"
  source: /note="DNA/RNA"
  modified_base (1)..(1): 5-methyl modified nucleotide
  modified_base (7)..(7): bicyclic nucleic acid (BNA)
  modified_base (8)..(8): bicyclic nucleic acid (BNA)
  source: /note="3' tri-ethylene glycol (TEG)"
cgguaagt

SEQ ID NO: 19939 - RNA, 20 nt, Artificial Sequence
  source: /note="Description of Artificial Sequence: Synthetic oligonucleotide"
  source: /note="RNA"
  modified_base (2)..(2): 5-methyl modified nucleotide
  modified_base (11)..(11): 5-methyl modified nucleotide
  modified_base (15)..(15): 5-methyl modified nucleotide
  modified_base (16)..(16): 5-methyl modified nucleotide
  modified_base (19)..(19): bicyclic nucleic acid (BNA)
  modified_base (20)..(20): 5-methyl bicyclic nucleic acid
  source: /note="3' tri-ethylene glycol (TEG)"
ucgguaaguucuguccaagc

SEQ ID NO: 19940 - RNA, 19 nt, Artificial Sequence
  source: /note="Description of Artificial Sequence: Synthetic oligonucleotide"
  source: /note="RNA"
  modified_base (2)..(2): 5-methyl modified nucleotide
  modified_base (11)..(11): 5-methyl modified nucleotide
  modified_base (15)..(15): 5-methyl modified nucleotide
  modified_base (16)..(16): 5-methyl modified nucleotide
  modified_base (18)..(18): bicyclic nucleic acid (BNA)
  modified_base (19)..(19): bicyclic nucleic acid (BNA)
  source: /note="3' tri-ethylene glycol (TEG)"
ucgguaaguucuguccaag

SEQ ID NO: 19941 - RNA, 18 nt, Artificial Sequence
  source: /note="Description of Artificial Sequence: Synthetic oligonucleotide"
  source: /note="RNA"
  modified_base (2)..(2): 5-methyl modified nucleotide
  modified_base (11)..(11): 5-methyl modified nucleotide
  modified_base (15)..(15): 5-methyl modified nucleotide
  modified_base (16)..(16): 5-methyl modified nucleotide
  modified_base (17)..(17): bicyclic nucleic acid (BNA)
  modified_base (18)..(18): bicyclic nucleic acid (BNA)
  source: /note="3' tri-ethylene glycol (TEG)"
ucgguaaguucuguccaa

SEQ ID NO: 19942 - RNA, 17 nt, Artificial Sequence
  source: /note="Description of Artificial Sequence: Synthetic oligonucleotide"
  source: /note="RNA"
  modified_base (2)..(2): 5-methyl modified nucleotide
  modified_base (11)..(11): 5-methyl modified nucleotide
  modified_base (15)..(15): 5-methyl modified nucleotide
  modified_base (16)..(16): 5-methyl bicyclic nucleic acid
  modified_base (17)..(17): bicyclic nucleic acid (BNA)
  source: /note="3' tri-ethylene glycol (TEG)"
ucgguaaguucugucca

SEQ ID NO: 19943 - RNA, 16 nt, Artificial Sequence
  source: /note="Description of Artificial Sequence: Synthetic oligonucleotide"
  source: /note="RNA"
  modified_base (2)..(2): 5-methyl modified nucleotide
  modified_base (11)..(11): 5-methyl modified nucleotide
  modified_base (15)..(15): 5-methyl bicyclic nucleic acid
  modified_base (16)..(16): 5-methyl bicyclic nucleic acid
  source: /note="3' tri-ethylene glycol (TEG)"
ucgguaaguucugucc

SEQ ID NO: 19944 - DNA, 15 bp, Artificial Sequence
  source: /note="Description of Artificial Sequence: Synthetic oligonucleotide"
  source: /note="Description of Combined DNA/RNA Molecule: Synthetic oligonucleotide"
  source: /note="DNA/RNA"
  modified_base (2)..(2): 5-methyl modified nucleotide
  modified_base (11)..(11): 5-methyl modified nucleotide
  modified_base (14)..(14): bicyclic nucleic acid (BNA)
  modified_base (15)..(15): 5-methyl bicyclic nucleic acid
  source: /note="3' tri-ethylene glycol (TEG)"
ucgguaaguucugtc

SEQ ID NO: 19945 - DNA, 14 bp, Artificial Sequence
  source: /note="Description of Artificial Sequence: Synthetic oligonucleotide"
  source: /note="Description of Combined DNA/RNA Molecule: Synthetic oligonucleotide"
  source: /note="DNA/RNA"
  modified_base (2)..(2): 5-methyl modified nucleotide
  modified_base (11)..(11): 5-methyl modified nucleotide
  modified_base (13)..(13): bicyclic nucleic acid (BNA)
  modified_base (14)..(14): bicyclic nucleic acid (BNA)
  source: /note="3' tri-ethylene glycol (TEG)"
ucgguaaguucugt

SEQ ID NO: 19946 - DNA, 13 bp, Artificial Sequence
  source: /note="Description of Artificial Sequence: Synthetic oligonucleotide"
  source: /note="Description of Combined DNA/RNA Molecule: Synthetic oligonucleotide"
  source: /note="DNA/RNA"
  modified_base (2)..(2): 5-methyl modified nucleotide
  modified_base (11)..(11): 5-methyl modified nucleotide
  modified_base (12)..(12): bicyclic nucleic acid (BNA)
  modified_base (13)..(13): bicyclic nucleic acid (BNA)
  source: /note="3' tri-ethylene glycol (TEG)"
ucgguaaguuctg

SEQ ID NO: 19947 - DNA, 12 bp, Artificial Sequence
  source: /note="Description of Artificial Sequence: Synthetic oligonucleotide"
  source: /note="Description of Combined DNA/RNA Molecule: Synthetic oligonucleotide"
  source: /note="DNA/RNA"
  modified_base (2)..(2): 5-methyl modified nucleotide
  modified_base (11)..(11): 5-methyl bicyclic nucleic acid
  modified_base (12)..(12): bicyclic nucleic acid (BNA)
  source: /note="3' tri-ethylene glycol (TEG)"
ucgguaaguuct

SEQ ID NO: 19948 - DNA, 11 bp, Artificial Sequence
  source: /note="Description of Artificial Sequence: Synthetic oligonucleotide"
  source: /note="Description of Combined DNA/RNA Molecule: Synthetic oligonucleotide"
  source: /note="DNA/RNA"
  modified_base (2)..(2): 5-methyl modified nucleotide
  modified_base (10)..(10): bicyclic nucleic acid (BNA)
  modified_base (11)..(11): 5-methyl bicyclic nucleic acid
  source: /note="3' tri-ethylene glycol (TEG)"
ucgguaagutc

SEQ ID NO: 19949 - DNA, 10 bp, Artificial Sequence
  source: /note="Description of Artificial Sequence: Synthetic oligonucleotide"
  source: /note="Description of Combined DNA/RNA Molecule: Synthetic oligonucleotide"
  source: /note="DNA/RNA"
  modified_base (2)..(2): 5-methyl modified nucleotide
  modified_base (9)..(9): bicyclic nucleic acid (BNA)
  modified_base (10)..(10): bicyclic nucleic acid (BNA)
  source: /note="3' tri-ethylene glycol (TEG)"
ucgguaagtt

SEQ ID NO: 19950 - DNA, 9 bp, Artificial Sequence
  source: /note="Description of Artificial Sequence: Synthetic oligonucleotide"
  source: /note="Description of Combined DNA/RNA Molecule: Synthetic oligonucleotide"
  source: /note="DNA/RNA"
  modified_base (2)..(2): 5-methyl modified nucleotide
  modified_base (8)..(8): bicyclic nucleic acid (BNA)
  modified_base (9)..(9): bicyclic nucleic acid (BNA)
  source: /note="3' tri-ethylene glycol (TEG)"
ucgguaagt

SEQ ID NO: 19951 - RNA, 20 nt, Artificial Sequence
  source: /note="Description of Artificial Sequence: Synthetic oligonucleotide"
  source: /note="RNA"
  modified_base (3)..(3): 5-methyl modified nucleotide
  modified_base (12)..(12): 5-methyl modified nucleotide
  modified_base (16)..(16): 5-methyl modified nucleotide
  modified_base (17)..(17): 5-methyl modified nucleotide
  modified_base (19)..(19): bicyclic nucleic acid (BNA)
  modified_base (20)..(20): bicyclic nucleic acid (BNA)
  source: /note="3' tri-ethylene glycol (TEG)"
gucgguaaguucuguccaag

SEQ ID NO: 19952 - RNA, 19 nt, Artificial Sequence
  source: /note="Description of Artificial Sequence: Synthetic oligonucleotide"
  source: /note="RNA"
  modified_base (3)..(3): 5-methyl modified nucleotide
  modified_base (12)..(12): 5-methyl modified nucleotide
  modified_base (16)..(16): 5-methyl modified nucleotide
  modified_base (17)..(17): 5-methyl modified nucleotide
  modified_base (18)..(18): bicyclic nucleic acid (BNA)
  modified_base (19)..(19): bicyclic nucleic acid (BNA)
  source: /note="3' tri-ethylene glycol (TEG)"
gucgguaaguucuguccaa

SEQ ID NO: 19953 - RNA, 18 nt, Artificial Sequence
  source: /note="Description of Artificial Sequence: Synthetic oligonucleotide"
  source: /note="RNA"
  modified_base (3)..(3): 5-methyl modified nucleotide
  modified_base (12)..(12): 5-methyl modified nucleotide
  modified_base (16)..(16): 5-methyl modified nucleotide
  modified_base (17)..(17): 5-methyl bicyclic nucleic acid
  modified_base (18)..(18): bicyclic nucleic acid (BNA)
  source: /note="3' tri-ethylene glycol (TEG)"
gucgguaaguucugucca

SEQ ID NO: 19954 - RNA, 17 nt, Artificial Sequence
  source: /note="Description of Artificial Sequence: Synthetic oligonucleotide"
  source: /note="RNA"
  modified_base (3)..(3): 5-methyl modified nucleotide
  modified_base (12)..(12): 5-methyl modified nucleotide
  modified_base (16)..(16): 5-methyl bicyclic nucleic acid
  modified_base (17)..(17): 5-methyl bicyclic nucleic acid
  source: /note="3' tri-ethylene glycol (TEG)"
gucgguaaguucugucc

SEQ ID NO: 19955 - DNA, 16 bp, Artificial Sequence
  source: /note="Description of Artificial Sequence: Synthetic oligonucleotide"
  source: /note="Description of Combined DNA/RNA Molecule: Synthetic oligonucleotide"
  source: /note="DNA/RNA"
  modified_base (3)..(3): 5-methyl modified nucleotide
  modified_base (12)..(12): 5-methyl modified nucleotide
  modified_base (15)..(15): bicyclic nucleic acid (BNA)
  modified_base (16)..(16): 5-methyl bicyclic nucleic acid
  source: /note="3' tri-ethylene glycol (TEG)"
gucgguaaguucugtc

SEQ ID NO: 19956 - DNA, 15 bp, Artificial Sequence
  source: /note="Description of Artificial Sequence: Synthetic oligonucleotide"
  source: /note="Description of Combined DNA/RNA Molecule: Synthetic oligonucleotide"
  source: /note="DNA/RNA"
  modified_base (3)..(3): 5-methyl modified nucleotide
  modified_base (12)..(12): 5-methyl modified nucleotide
  modified_base (14)..(14): bicyclic nucleic acid (BNA)
  modified_base (15)..(15): bicyclic nucleic acid (BNA)
  source: /note="3' tri-ethylene glycol (TEG)"
gucgguaaguucugt

SEQ ID NO: 19957 - DNA, 14 bp, Artificial Sequence
  source: /note="Description of Artificial Sequence: Synthetic oligonucleotide"
  source: /note="Description of Combined DNA/RNA Molecule: Synthetic oligonucleotide"
  source: /note="DNA/RNA"
  modified_base (3)..(3): 5-methyl modified nucleotide
  modified_base (12)..(12): 5-methyl modified nucleotide
  modified_base (13)..(13): bicyclic nucleic acid (BNA)
  modified_base (14)..(14): bicyclic nucleic acid (BNA)
  source: /note="3' tri-ethylene glycol (TEG)"
gucgguaaguuctg

SEQ ID NO: 19958 - DNA, 13 bp, Artificial Sequence
  source: /note="Description of Artificial Sequence: Synthetic oligonucleotide"
  source: /note="Description of Combined DNA/RNA Molecule: Synthetic oligonucleotide"
  source: /note="DNA/RNA"
  modified_base (3)..(3): 5-methyl modified nucleotide
  modified_base (12)..(12): 5-methyl bicyclic nucleic acid
  modified_base (13)..(13): bicyclic nucleic acid (BNA)
  source: /note="3' tri-ethylene glycol (TEG)"
gucgguaaguuct

SEQ ID NO: 19959 - DNA, 12 bp, Artificial Sequence
  source: /note="Description of Artificial Sequence: Synthetic oligonucleotide"
  source: /note="Description of Combined DNA/RNA Molecule: Synthetic oligonucleotide"
  source: /note="DNA/RNA"
  modified_base (3)..(3): 5-methyl modified nucleotide
  modified_base (11)..(11): bicyclic nucleic acid (BNA)
  modified_base (12)..(12): 5-methyl bicyclic nucleic acid
  source: /note="3' tri-ethylene glycol (TEG)"
gucgguaagutc

SEQ ID NO: 19960 - DNA, 11 bp, Artificial Sequence
  source: /note="Description of Artificial Sequence: Synthetic oligonucleotide"
  source: /note="Description of Combined DNA/RNA Molecule: Synthetic oligonucleotide"
  source: /note="DNA/RNA"
  modified_base (3)..(3): 5-methyl modified nucleotide
  modified_base (10)..(10): bicyclic nucleic acid (BNA)
  modified_base (11)..(11): bicyclic nucleic acid (BNA)
  source: /note="3' tri-ethylene glycol (TEG)"
gucgguaagtt

SEQ ID NO: 19961 - DNA, 10 bp, Artificial Sequence
  source: /note="Description of Artificial Sequence: Synthetic oligonucleotide"
  source: /note="Description of Combined DNA/RNA Molecule: Synthetic oligonucleotide"
  source: /note="DNA/RNA"
  modified_base (3)..(3): 5-methyl modified nucleotide
  modified_base (9)..(9): bicyclic nucleic acid (BNA)
  modified_base (10)..(10): bicyclic nucleic acid (BNA)
  source: /note="3' tri-ethylene glycol (TEG)"
gucgguaagt

SEQ ID NO: 19962 - RNA, 20 nt, Artificial Sequence
  source: /note="Description of Artificial Sequence: Synthetic oligonucleotide"
  source: /note="RNA"
  modified_base (4)..(4): 5-methyl modified nucleotide
  modified_base (13)..(13): 5-methyl modified nucleotide
  modified_base (17)..(17): 5-methyl modified nucleotide
  modified_base (18)..(18): 5-methyl modified nucleotide
  modified_base (19)..(19): bicyclic nucleic acid (BNA)
  modified_base (20)..(20): bicyclic nucleic acid (BNA)
  source: /note="3' tri-ethylene glycol (TEG)"
agucgguaaguucuguccaa

SEQ ID NO: 19963 - RNA, 19 nt, Artificial Sequence
  source: /note="Description of Artificial Sequence: Synthetic oligonucleotide"
  source: /note="RNA"
  modified_base (4)..(4): 5-methyl modified nucleotide
  modified_base (13)..(13): 5-methyl modified nucleotide
  modified_base (17)..(17): 5-methyl modified nucleotide
  modified_base (18)..(18): 5-methyl bicyclic nucleic acid
  modified_base (19)..(19): bicyclic nucleic acid (BNA)
  source: /note="3' tri-ethylene glycol (TEG)"
agucgguaaguucugucca

SEQ ID NO: 19964 - DNA, 17 bp, Artificial Sequence
  source: /note="Description of Artificial Sequence: Synthetic oligonucleotide"
  source: /note="Description of Combined DNA/RNA Molecule: Synthetic oligonucleotide"
  source: /note="DNA/RNA"
  modified_base (4)..(4): 5-methyl modified nucleotide
  modified_base (13)..(13): 5-methyl modified nucleotide
  modified_base (16)..(16): bicyclic nucleic acid (BNA)
  modified_base (17)..(17): 5-methyl bicyclic nucleic acid
  source: /note="3' tri-ethylene glycol (TEG)"
agucgguaaguucugtc

SEQ ID NO: 19965 - DNA, 16 bp, Artificial Sequence
  source: /note="Description of Artificial Sequence: Synthetic oligonucleotide"
  source: /note="Description of Combined DNA/RNA Molecule: Synthetic oligonucleotide"
  source: /note="DNA/RNA"
  modified_base (4)..(4): 5-methyl modified nucleotide
  modified_base (13)..(13): 5-methyl modified nucleotide
  modified_base (15)..(15): bicyclic nucleic acid (BNA)
  modified_base (16)..(16): bicyclic nucleic acid (BNA)
  source: /note="3' tri-ethylene glycol (TEG)"
agucgguaaguucugt

SEQ ID NO: 19966 - DNA, 15 bp, Artificial Sequence
  source: /note="Description of Artificial Sequence: Synthetic oligonucleotide"
  source: /note="Description of Combined DNA/RNA Molecule: Synthetic oligonucleotide"
  source: /note="DNA/RNA"
  modified_base (4)..(4): 5-methyl modified nucleotide
  modified_base (13)..(13): 5-methyl modified nucleotide
  modified_base (14)..(14): bicyclic nucleic acid (BNA)
  modified_base (15)..(15): bicyclic nucleic acid (BNA)
  source: /note="3' tri-ethylene glycol (TEG)"
agucgguaaguuctg

SEQ ID NO: 19967 - DNA, 14 bp, Artificial Sequence
  source: /note="Description of Artificial Sequence: Synthetic oligonucleotide"
  source: /note="Description of Combined DNA/RNA Molecule: Synthetic oligonucleotide"
  source: /note="DNA/RNA"
  modified_base (4)..(4): 5-methyl modified nucleotide
  modified_base (13)..(13): 5-methyl bicyclic nucleic acid
  modified_base (14)..(14): bicyclic nucleic acid (BNA)
  source: /note="3' tri-ethylene glycol (TEG)"
agucgguaaguuct

SEQ ID NO: 19968 - DNA, 13 bp, Artificial Sequence
  source: /note="Description of Artificial Sequence: Synthetic oligonucleotide"
  source: /note="Description of Combined DNA/RNA Molecule: Synthetic oligonucleotide"
  source: /note="DNA/RNA"
  modified_base (4)..(4): 5-methyl modified nucleotide
  modified_base (12)..(12): bicyclic nucleic acid (BNA)
  modified_base (13)..(13): 5-methyl bicyclic nucleic acid
  source: /note="3' tri-ethylene glycol (TEG)"
agucgguaagutc

SEQ ID NO: 19969 - DNA, 12 bp, Artificial Sequence
  source: /note="Description of Artificial Sequence: Synthetic oligonucleotide"
  source: /note="Description of Combined DNA/RNA Molecule: Synthetic oligonucleotide"
  source: /note="DNA/RNA"
  modified_base (4)..(4): 5-methyl modified nucleotide
  modified_base (11)..(11): bicyclic nucleic acid (BNA)
  modified_base (12)..(12): bicyclic nucleic acid (BNA)
  source: /note="3' tri-ethylene glycol (TEG)"
agucgguaagtt

SEQ ID NO: 19970 - DNA, 11 bp, Artificial Sequence
  source: /note="Description of Artificial Sequence: Synthetic oligonucleotide"
  source: /note="Description of Combined DNA/RNA Molecule: Synthetic oligonucleotide"
  source: /note="DNA/RNA"
  modified_base (4)..(4): 5-methyl modified nucleotide
  modified_base (10)..(10): bicyclic nucleic acid (BNA)
  modified_base (11)..(11): bicyclic nucleic acid (BNA)
  source: /note="3' tri-ethylene glycol (TEG)"
agucgguaagt

SEQ ID NO: 19971 - RNA, 20 nt, Artificial Sequence
  source: /note="Description of Artificial Sequence: Synthetic oligonucleotide"
  source: /note="RNA"
  modified_base (1)..(1): 5-methyl modified nucleotide
  modified_base (5)..(5): 5-methyl modified nucleotide
  modified_base (14)..(14): 5-methyl modified nucleotide
  modified_base (18)..(18): 5-methyl modified nucleotide
  modified_base (19)..(19): 5-methyl bicyclic nucleic acid
  modified_base (20)..(20): bicyclic nucleic acid (BNA)
  source: /note="3' tri-ethylene glycol (TEG)"
cagucgguaaguucugucca

SEQ ID NO: 19972 - RNA, 19 nt, Artificial Sequence
  source: /note="Description of Artificial Sequence: Synthetic oligonucleotide"
  source: /note="RNA"
  modified_base (1)..(1): 5-methyl modified nucleotide
  modified_base (5)..(5): 5-methyl modified nucleotide
  modified_base (14)..(14): 5-methyl modified nucleotide
  modified_base (18)..(18): 5-methyl bicyclic nucleic acid
  modified_base (19)..(19): 5-methyl bicyclic nucleic acid
  source: /note="3' tri-ethylene glycol (TEG)"
cagucgguaaguucugucc

SEQ ID NO: 19973 - DNA, 18 bp, Artificial Sequence
  source: /note="Description of Artificial Sequence: Synthetic oligonucleotide"
  source: /note="Description of Combined DNA/RNA Molecule: Synthetic oligonucleotide"
  source: /note="DNA/RNA"
  modified_base (1)..(1): 5-methyl modified nucleotide
  modified_base (5)..(5): 5-methyl modified nucleotide
  modified_base (14)..(14): 5-methyl modified nucleotide
  modified_base (17)..(17): bicyclic nucleic acid (BNA)
  modified_base (18)..(18): 5-methyl bicyclic nucleic acid
  source: /note="3' tri-ethylene glycol (TEG)"
cagucgguaaguucugtc

SEQ ID NO: 19974 - DNA, 17 bp, Artificial Sequence
  source: /note="Description of Artificial Sequence: Synthetic oligonucleotide"
  source: /note="Description of Combined DNA/RNA Molecule: Synthetic oligonucleotide"
  source: /note="DNA/RNA"
  modified_base (1)..(1): 5-methyl modified nucleotide
  modified_base (5)..(5): 5-methyl modified nucleotide
  modified_base (14)..(14): 5-methyl modified nucleotide
  modified_base (16)..(16): bicyclic nucleic acid (BNA)
  modified_base (17)..(17): bicyclic nucleic acid (BNA)
  source: /note="3' tri-ethylene glycol (TEG)"
cagucgguaaguucugt

SEQ ID NO: 19975 - DNA, 16 bp, Artificial Sequence
  source: /note="Description of Artificial Sequence: Synthetic oligonucleotide"
  source: /note="Description of Combined DNA/RNA Molecule: Synthetic oligonucleotide"
  source: /note="DNA/RNA"
  modified_base (1)..(1): 5-methyl modified nucleotide
  modified_base (5)..(5): 5-methyl modified nucleotide
  modified_base (14)..(14): 5-methyl modified nucleotide
  modified_base (15)..(15): bicyclic nucleic acid (BNA)
  modified_base (16)..(16): bicyclic nucleic acid (BNA)
  source: /note="3' tri-ethylene glycol (TEG)"
cagucgguaaguuctg

SEQ ID NO: 19976 - DNA, 15 bp, Artificial Sequence
  source: /note="Description of Artificial Sequence: Synthetic oligonucleotide"
  source: /note="Description of Combined DNA/RNA Molecule: Synthetic oligonucleotide"
  source: /note="DNA/RNA"
  modified_base (1)..(1): 5-methyl modified nucleotide
  modified_base (5)..(5): 5-methyl modified nucleotide
  modified_base (14)..(14): 5-methyl bicyclic nucleic acid
  modified_base (15)..(15): bicyclic nucleic acid (BNA)
  source: /note="3' tri-ethylene glycol (TEG)"
cagucgguaaguuct

SEQ ID NO: 19977 - DNA, 14 bp, Artificial Sequence
  source: /note="Description of Artificial Sequence: Synthetic oligonucleotide"
  source: /note="Description of Combined DNA/RNA Molecule: Synthetic oligonucleotide"
  source: /note="DNA/RNA"
  modified_base (1)..(1): 5-methyl modified nucleotide
  modified_base (5)..(5): 5-methyl modified nucleotide
  modified_base (13)..(13): bicyclic nucleic acid (BNA)
  modified_base (14)..(14): 5-methyl bicyclic nucleic acid
  source: /note="3' tri-ethylene glycol (TEG)"
cagucgguaagutc

SEQ ID NO: 19978 - DNA, 13 bp, Artificial Sequence
  source: /note="Description of Artificial Sequence: Synthetic oligonucleotide"
  source: /note="Description of Combined DNA/RNA Molecule: Synthetic oligonucleotide"
  source: /note="DNA/RNA"
  modified_base (1)..(1): 5-methyl modified nucleotide
  modified_base (5)..(5): 5-methyl modified nucleotide
  modified_base (12)..(12): bicyclic nucleic acid (BNA)
  modified_base (13)..(13): bicyclic nucleic acid (BNA)
  source: /note="3' tri-ethylene glycol (TEG)"
cagucgguaagtt

SEQ ID NO: 19979 - DNA, 12 bp, Artificial Sequence
  source: /note="Description of Artificial Sequence: Synthetic oligonucleotide"
  source: /note="Description of Combined DNA/RNA Molecule: Synthetic oligonucleotide"
  source: /note="DNA/RNA"
  modified_base (1)..(1): 5-methyl modified nucleotide
  modified_base (5)..(5): 5-methyl modified nucleotide
  modified_base (11)..(11): bicyclic nucleic acid (BNA)
  modified_base (12)..(12): bicyclic nucleic acid (BNA)
  source: /note="3' tri-ethylene glycol (TEG)"
cagucgguaagt

SEQ ID NO: 19980 - RNA, 20 nt, Artificial Sequence
  source: /note="Description of Artificial Sequence: Synthetic oligonucleotide"
  source: /note="RNA"
  modified_base (1)..(1): 5-methyl modified nucleotide
  modified_base (2)..(2): 5-methyl modified nucleotide
  modified_base (6)..(6): 5-methyl modified nucleotide
  modified_base (15)..(15): 5-methyl modified nucleotide
  modified_base (19)..(19): 5-methyl bicyclic nucleic acid
  modified_base (20)..(20): 5-methyl bicyclic nucleic acid
  source: /note="3' tri-ethylene glycol (TEG)"
ccagucgguaaguucugucc

SEQ ID NO: 19981 - DNA, 19 bp, Artificial Sequence
  source: /note="Description of Artificial Sequence: Synthetic oligonucleotide"
  source: /note="Description of Combined DNA/RNA Molecule: Synthetic oligonucleotide"
  source: /note="DNA/RNA"
  modified_base (1)..(1): 5-methyl modified nucleotide
  modified_base (2)..(2): 5-methyl modified nucleotide
  modified_base (6)..(6): 5-methyl modified nucleotide
  modified_base (15)..(15): 5-methyl modified nucleotide
  modified_base (18)..(18): bicyclic nucleic acid (BNA)
  modified_base (19)..(19): 5-methyl bicyclic nucleic acid
  source: /note="3' tri-ethylene glycol (TEG)"
ccagucgguaaguucugtc

SEQ ID NO: 19982 - DNA, 18 bp, Artificial Sequence
  source: /note="Description of Artificial Sequence: Synthetic oligonucleotide"
  source: /note="Description of Combined DNA/RNA Molecule: Synthetic oligonucleotide"
  source: /note="DNA/RNA"
  modified_base (1)..(1): 5-methyl modified nucleotide
  modified_base (2)..(2): 5-methyl modified nucleotide
  modified_base (6)..(6): 5-methyl modified nucleotide
  modified_base (15)..(15): 5-methyl modified nucleotide
  modified_base (17)..(17): bicyclic nucleic acid (BNA)
  modified_base (18)..(18): bicyclic nucleic acid (BNA)
  source: /note="3' tri-ethylene glycol (TEG)"
ccagucgguaaguucugt

SEQ ID NO: 19983 - DNA, 17 bp, Artificial Sequence
  source: /note="Description of Artificial Sequence: Synthetic oligonucleotide"
  source: /note="Description of Combined DNA/RNA Molecule: Synthetic oligonucleotide"
  source: /note="DNA/RNA"
  modified_base (1)..(1): 5-methyl modified nucleotide
  modified_base (2)..(2): 5-methyl modified nucleotide
  modified_base (6)..(6): 5-methyl modified nucleotide
  modified_base (15)..(15): 5-methyl modified nucleotide
  modified_base (16)..(16): bicyclic nucleic acid (BNA)
  modified_base (17)..(17): bicyclic nucleic acid (BNA)
  source: /note="3' tri-ethylene glycol (TEG)"
ccagucgguaaguuctg

SEQ ID NO: 19984 - DNA, 16 bp, Artificial Sequence
  source: /note="Description of Artificial Sequence: Synthetic oligonucleotide"
  source: /note="Description of Combined DNA/RNA Molecule: Synthetic oligonucleotide"
  source: /note="DNA/RNA"
  modified_base (1)..(1): 5-methyl modified nucleotide
  modified_base (2)..(2): 5-methyl modified nucleotide
  modified_base (6)..(6): 5-methyl modified nucleotide
  modified_base (15)..(15): 5-methyl bicyclic nucleic acid
  modified_base (16)..(16): bicyclic nucleic acid (BNA)
  source: /note="3' tri-ethylene glycol (TEG)"
ccagucgguaaguuct

SEQ ID NO: 19985 - DNA, 15 bp, Artificial Sequence
  source: /note="Description of Artificial Sequence: Synthetic oligonucleotide"
  source: /note="Description of Combined DNA/RNA Molecule: Synthetic oligonucleotide"
  source: /note="DNA/RNA"
  modified_base (1)..(1): 5-methyl modified nucleotide
  modified_base (2)..(2): 5-methyl modified nucleotide
  modified_base (6)..(6): 5-methyl modified nucleotide
  modified_base (14)..(14): bicyclic nucleic acid (BNA)
  modified_base (15)..(15): 5-methyl bicyclic nucleic acid
  source: /note="3' tri-ethylene glycol (TEG)"
ccagucgguaagutc

SEQ ID NO: 19986 - DNA, 14 bp, Artificial Sequence
  source: /note="Description of Artificial Sequence: Synthetic oligonucleotide"
  source: /note="Description of Combined DNA/RNA Molecule: Synthetic oligonucleotide"
  source: /note="DNA/RNA"
  modified_base (1)..(1): 5-methyl modified nucleotide
  modified_base (2)..(2): 5-methyl modified nucleotide
  modified_base (6)..(6): 5-methyl modified nucleotide
  modified_base (13)..(13): bicyclic nucleic acid (BNA)
  modified_base (14)..(14): bicyclic nucleic acid (BNA)
  source: /note="3' tri-ethylene glycol (TEG)"
ccagucgguaagtt

SEQ ID NO: 19987 - DNA, 13 bp, Artificial Sequence
  source: /note="Description of Artificial Sequence: Synthetic oligonucleotide"
  source: /note="Description of Combined DNA/RNA Molecule: Synthetic oligonucleotide"
  source: /note="DNA/RNA"
  modified_base (1)..(1): 5-methyl modified nucleotide
  modified_base (2)..(2): 5-methyl modified nucleotide
  modified_base (6)..(6): 5-methyl modified nucleotide
  modified_base (12)..(12): bicyclic nucleic acid (BNA)
  modified_base (13)..(13): bicyclic nucleic acid (BNA)
  source: /note="3' tri-ethylene glycol (TEG)"
ccagucgguaagt

SEQ ID NO: 19988 - DNA, 20 bp, Artificial Sequence
  source: /note="Description of Artificial Sequence: Synthetic oligonucleotide"
  source: /note="Description of Combined DNA/RNA Molecule: Synthetic oligonucleotide"
  source: /note="DNA/RNA"
  modified_base (2)..(2): 5-methyl modified nucleotide
  modified_base (3)..(3): 5-methyl modified nucleotide
  modified_base (7)..(7): 5-methyl modified nucleotide
  modified_base (16)..(16): 5-methyl modified nucleotide
  modified_base (19)..(19): bicyclic nucleic acid (BNA)
  modified_base (20)..(20): 5-methyl bicyclic nucleic acid
  source: /note="3' tri-ethylene glycol (TEG)"
gccagucgguaaguucugtc

SEQ ID NO: 19989 - DNA, 19 bp, Artificial Sequence
  source: /note="Description of Artificial Sequence: Synthetic oligonucleotide"
  source: /note="Description of Combined DNA/RNA Molecule: Synthetic oligonucleotide"
  source: /note="DNA/RNA"
  modified_base (2)..(2): 5-methyl modified nucleotide
  modified_base (3)..(3): 5-methyl modified nucleotide
  modified_base (7)..(7): 5-methyl modified nucleotide
  modified_base (16)..(16): 5-methyl modified nucleotide
  modified_base (18)..(18): bicyclic nucleic acid (BNA)
  modified_base (19)..(19): bicyclic nucleic acid (BNA)
  source: /note="3' tri-ethylene glycol (TEG)"
gccagucgguaaguucugt

SEQ ID NO: 19990 - DNA, 18 bp, Artificial Sequence
  source: /note="Description of Artificial Sequence: Synthetic oligonucleotide"
  source: /note="Description of Combined DNA/RNA Molecule: Synthetic oligonucleotide"
  source: /note="DNA/RNA"
  modified_base (2)..(2): 5-methyl modified nucleotide
  modified_base (3)..(3): 5-methyl modified nucleotide
  modified_base (7)..(7): 5-methyl modified nucleotide
  modified_base (16)..(16): 5-methyl modified nucleotide
  modified_base (17)..(17): bicyclic nucleic acid (BNA)
  modified_base (18)..(18): bicyclic nucleic acid (BNA)
  source: /note="3' tri-ethylene glycol (TEG)"
gccagucgguaaguuctg

SEQ ID NO: 19991 - DNA, 17 bp, Artificial Sequence
  source: /note="Description of Artificial Sequence: Synthetic oligonucleotide"
  source: /note="Description of Combined DNA/RNA Molecule: Synthetic oligonucleotide"
  source: /note="DNA/RNA"
  modified_base (2)..(2): 5-methyl modified nucleotide
  modified_base (3)..(3): 5-methyl modified nucleotide
  modified_base (7)..(7): 5-methyl modified nucleotide
  modified_base (16)..(16): 5-methyl bicyclic nucleic acid
  modified_base (17)..(17): bicyclic nucleic acid (BNA)
  source: /note="3' tri-ethylene glycol (TEG)"
gccagucgguaaguuct

SEQ ID NO: 19992 - DNA, 16 bp, Artificial Sequence
  source: /note="Description of Artificial Sequence: Synthetic oligonucleotide"
  source: /note="Description of Combined DNA/RNA Molecule: Synthetic oligonucleotide"
  source: /note="DNA/RNA"
  modified_base (2)..(2): 5-methyl modified nucleotide
  modified_base (3)..(3): 5-methyl modified nucleotide
  modified_base (7)..(7): 5-methyl modified nucleotide
  modified_base (15)..(15): bicyclic nucleic acid (BNA)
  modified_base (16)..(16): 5-methyl bicyclic nucleic acid
  source: /note="3' tri-ethylene glycol (TEG)"
gccagucgguaagutc

SEQ ID NO: 19993 - DNA, 15 bp, Artificial Sequence
  source: /note="Description of Artificial Sequence: Synthetic oligonucleotide"
  source: /note="Description of Combined DNA/RNA Molecule: Synthetic oligonucleotide"
  source: /note="DNA/RNA"
  modified_base (2)..(2): 5-methyl modified nucleotide
  modified_base (3)..(3): 5-methyl modified nucleotide
  modified_base (7)..(7): 5-methyl modified nucleotide
  modified_base (14)..(14): bicyclic nucleic acid (BNA)
  modified_base (15)..(15): bicyclic nucleic acid (BNA)
  source: /note="3' tri-ethylene glycol (TEG)"
gccagucgguaagtt

SEQ ID NO: 19994 - DNA, 14 bp, Artificial Sequence
  source: /note="Description of Artificial Sequence: Synthetic oligonucleotide"
  source: /note="Description of Combined DNA/RNA Molecule: Synthetic oligonucleotide"
  source: /note="DNA/RNA"
  modified_base (2)..(2): 5-methyl modified nucleotide
  modified_base (3)..(3): 5-methyl modified nucleotide
  modified_base (7)..(7): 5-methyl modified nucleotide
  modified_base (13)..(13): bicyclic nucleic acid (BNA)
  modified_base (14)..(14): bicyclic nucleic acid (BNA)
  source: /note="3' tri-ethylene glycol (TEG)"
gccagucgguaagt

SEQ ID NO: 19995 - DNA, 20 bp, Artificial Sequence
  source: /note="Description of Artificial Sequence: Synthetic oligonucleotide"
  source: /note="Description of Combined DNA/RNA Molecule: Synthetic oligonucleotide"
  source: /note="DNA/RNA"
  modified_base (2)..(2): 5-methyl modified nucleotide
  modified_base (14)..(14): 5-methyl modified nucleotide
  modified_base (19)..(19): 5-methyl bicyclic nucleic acid
  modified_base (20)..(20): bicyclic nucleic acid (BNA)
  source: /note="3' tri-ethylene glycol (TEG)"
ucaaggaagauggcauuuct

SEQ ID NO: 19996 - RNA, 22 nt, Artificial Sequence
  source: /note="Description of Artificial Sequence: Synthetic oligonucleotide"
  source: /note="RNA"
  modified_base (2)..(2): 5-methyl modified nucleotide
  modified_base (14)..(14): 5-methyl modified nucleotide
  modified_base (19)..(19): 5-methyl modified nucleotide
  modified_base (21)..(21): bicyclic nucleic acid (BNA)
  modified_base (22)..(22): bicyclic nucleic acid (BNA)
  source: /note="3' tri-ethylene glycol (TEG)"
ucaaggaagauggcauuucuag

SEQ ID NO: 19997 - DNA, 16 bp, Artificial Sequence
  source: /note="Description of Artificial Sequence: Synthetic oligonucleotide"
  source: /note="Description of Combined DNA/RNA Molecule: Synthetic oligonucleotide"
  source: /note="DNA/RNA"
  modified_base (2)..(2): 5-methyl modified nucleotide
  modified_base (14)..(14): 5-methyl modified nucleotide
  modified_base (15)..(15): bicyclic nucleic acid (BNA)
  modified_base (16)..(16): bicyclic nucleic acid (BNA)
  source: /note="3' tri-ethylene glycol (TEG)"
ucaaggaagauggcat

SEQ ID NO: 19998 - DNA, 15 bp, Artificial Sequence
  source: /note="Description of Artificial Sequence: Synthetic oligonucleotide"
  source: /note="Description of Combined DNA/RNA Molecule: Synthetic oligonucleotide"
  source: /note="DNA/RNA"
  modified_base (9)..(9): 5-methyl modified nucleotide
  modified_base (14)..(14): 5-methyl bicyclic nucleic acid
  modified_base (15)..(15): bicyclic nucleic acid (BNA)
  source: /note="3' tri-ethylene glycol (TEG)"
gaagauggcauuuct

SEQ ID NO: 19999 - DNA, 21 bp, Artificial Sequence
  source: /note="Description of Artificial Sequence: Synthetic oligonucleotide"
  source: /note="Description of Combined DNA/RNA Molecule: Synthetic oligonucleotide"
  source: /note="DNA/RNA"
  modified_base (2)..(2): 5-methyl modified nucleotide
  modified_base (14)..(14): 5-methyl modified nucleotide
  modified_base (19)..(19): 5-methyl modified nucleotide
  modified_base (20)..(20): bicyclic nucleic acid (BNA)
  modified_base (21)..(21): bicyclic nucleic acid (BNA)
  source: /note="3' tri-ethylene glycol (TEG)"
ucaaggaagauggcauuucta

SEQ ID NO: 20000 - DNA, 19 bp, Artificial Sequence
  source: /note="Description of Artificial Sequence: Synthetic oligonucleotide"
  source: /note="Description of Combined DNA/RNA Molecule: Synthetic oligonucleotide"
  source: /note="DNA/RNA"
  modified_base (2)..(2): 5-methyl modified nucleotide
  modified_base (14)..(14): 5-methyl modified nucleotide
  modified_base (18)..(18): bicyclic nucleic acid (BNA)
  modified_base (19)..(19): 5-methyl bicyclic nucleic acid
  source: /note="3' tri-ethylene glycol (TEG)"
ucaaggaagauggcauutc

SEQ ID NO: 20001 - DNA, 18 bp, Artificial Sequence
  source: /note="Description of Artificial Sequence: Synthetic oligonucleotide"
  source: /note="Description of Combined DNA/RNA Molecule: Synthetic oligonucleotide"
  source: /note="DNA/RNA"
  modified_base (2)..(2): 5-methyl modified nucleotide
  modified_base (14)..(14): 5-methyl modified nucleotide
  modified_base (17)..(17): bicyclic nucleic acid (BNA)
  modified_base (18)..(18): bicyclic nucleic acid (BNA)
  source: /note="3' tri-ethylene glycol (TEG)"
ucaaggaagauggcautt

SEQ ID NO: 20002 - DNA, 17 bp, Artificial Sequence
  source: /note="Description of Artificial Sequence: Synthetic oligonucleotide"
  source: /note="Description of Combined DNA/RNA Molecule: Synthetic oligonucleotide"
  source: /note="DNA/RNA"
  modified_base (2)..(2): 5-methyl modified nucleotide
  modified_base (14)..(14): 5-methyl modified nucleotide
  modified_base (16)..(16): bicyclic nucleic acid (BNA)
  modified_base (17)..(17): bicyclic nucleic acid (BNA)
  source: /note="3' tri-ethylene glycol (TEG)"
ucaaggaagauggcatt

SEQ ID NO: 20003 - RNA, 15 nt, Artificial Sequence
  source: /note="Description of Artificial Sequence: Synthetic oligonucleotide"
  source: /note="RNA"
  modified_base (2)..(2): 5-methyl modified nucleotide
  modified_base (14)..(14): 5-methyl bicyclic nucleic acid
  modified_base (15)..(15): bicyclic nucleic acid (BNA)
  source: /note="3' tri-ethylene glycol (TEG)"
ucaaggaagauggca

SEQ ID NO: 20004 - RNA, 14 nt, Artificial Sequence
  source: /note="Description of Artificial Sequence: Synthetic oligonucleotide"
  source: /note="RNA"
  modified_base (2)..(2): 5-methyl modified nucleotide
  modified_base (13)..(13): bicyclic nucleic acid (BNA)
  modified_base (14)..(14): 5-methyl bicyclic nucleic acid
  source: /note="3' tri-ethylene glycol (TEG)"
ucaaggaagauggc

SEQ ID NO: 20005 - RNA, 13 nt, Artificial Sequence
  source: /note="Description of Artificial Sequence: Synthetic oligonucleotide"
  source: /note="RNA"
  modified_base (2)..(2): 5-methyl modified nucleotide
  modified_base (12)..(12): bicyclic nucleic acid (BNA)
  modified_base (13)..(13): bicyclic nucleic acid (BNA)
  source: /note="3' tri-ethylene glycol (TEG)"
ucaaggaagaugg

SEQ ID NO: 20006 - DNA, 12 bp, Artificial Sequence
  source: /note="Description of Artificial Sequence: Synthetic oligonucleotide"
  source: /note="Description of Combined DNA/RNA Molecule: Synthetic oligonucleotide"
  source: /note="DNA/RNA"
  modified_base (2)..(2): 5-methyl modified nucleotide
  modified_base (11)..(11): bicyclic nucleic acid (BNA)
  modified_base (12)..(12): bicyclic nucleic acid (BNA)
  source: /note="3' tri-ethylene glycol (TEG)"
ucaaggaagatg

SEQ ID NO: 20007 - DNA, 11 bp, Artificial Sequence
  source: /note="Description of Artificial Sequence: Synthetic oligonucleotide"
  source: /note="Description of Combined DNA/RNA Molecule: Synthetic oligonucleotide"
  source: /note="DNA/RNA"
  modified_base (2)..(2): 5-methyl modified nucleotide
  modified_base (10)..(10): bicyclic nucleic acid (BNA)
  modified_base (11)..(11): bicyclic nucleic acid (BNA)
  source: /note="3' tri-ethylene glycol (TEG)"
ucaaggaagat

SEQ ID NO: 20008 - RNA, 10 nt, Artificial Sequence
  source: /note="Description of Artificial Sequence: Synthetic oligonucleotide"
  source: /note="RNA"
  modified_base (2)..(2): 5-methyl modified nucleotide
  modified_base (9)..(9): bicyclic nucleic acid (BNA)
  modified_base (10)..(10): bicyclic nucleic acid (BNA)
  source: /note="3' tri-ethylene glycol (TEG)"
ucaaggaaga

SEQ ID NO: 20009 - RNA, 9 nt, Artificial Sequence
  source: /note="Description of Artificial Sequence: Synthetic oligonucleotide"
  source: /note="RNA"
  modified_base (2)..(2): 5-methyl modified nucleotide
  modified_base (8)..(8): bicyclic nucleic acid (BNA)
  modified_base (9)..(9): bicyclic nucleic acid (BNA)
  source: /note="3' tri-ethylene glycol (TEG)"
ucaaggaag

SEQ ID NO: 20010 - RNA, 21 nt, Artificial Sequence
  source: /note="Description of Artificial Sequence: Synthetic oligonucleotide"
  source: /note="RNA"
  modified_base (1)..(1): 5-methyl modified nucleotide
  modified_base (13)..(13): 5-methyl modified nucleotide
  modified_base (18)..(18): 5-methyl modified nucleotide
  modified_base (20)..(20): bicyclic nucleic acid (BNA)
  modified_base (21)..(21): bicyclic nucleic acid (BNA)
  source: /note="3' tri-ethylene glycol (TEG)"
caaggaagauggcauuucuag

SEQ ID NO: 20011 - DNA, 20 bp, Artificial Sequence
  source: /note="Description of Artificial Sequence: Synthetic oligonucleotide"
  source: /note="Description of Combined DNA/RNA Molecule: Synthetic oligonucleotide"
  source: /note="DNA/RNA"
  modified_base (1)..(1): 5-methyl modified nucleotide
  modified_base (13)..(13): 5-methyl modified nucleotide
  modified_base (18)..(18): 5-methyl modified nucleotide
  modified_base (19)..(19): bicyclic nucleic acid (BNA)
  modified_base (20)..(20): bicyclic nucleic acid (BNA)
  source: /note="3' tri-ethylene glycol (TEG)"
caaggaagauggcauuucta

SEQ ID NO: 20012 - DNA, 19 bp, Artificial Sequence
  source: /note="Description of Artificial Sequence: Synthetic oligonucleotide"
  source: /note="Description of Combined DNA/RNA Molecule: Synthetic oligonucleotide"
  source: /note="DNA/RNA"
  modified_base (1)..(1): 5-methyl modified nucleotide
  modified_base (13)..(13): 5-methyl modified nucleotide
  modified_base (18)..(18): 5-methyl bicyclic nucleic acid
  modified_base (19)..(19): bicyclic nucleic acid (BNA)
  source: /note="3' tri-ethylene glycol (TEG)"
caaggaagauggcauuuct

SEQ ID NO: 20013 - DNA, 18 bp, Artificial Sequence
  source: /note="Description of Artificial Sequence: Synthetic oligonucleotide"
  source: /note="Description of Combined DNA/RNA Molecule: Synthetic oligonucleotide"
  source: /note="DNA/RNA"
  modified_base (1)..(1): 5-methyl modified nucleotide
  modified_base (13)..(13): 5-methyl modified nucleotide
  modified_base (17)..(17): bicyclic nucleic acid (BNA)
  modified_base (18)..(18): 5-methyl bicyclic nucleic acid
  source: /note="3' tri-ethylene glycol (TEG)"
caaggaagauggcauutc

SEQ ID NO: 20014 - DNA, 17 bp, Artificial Sequence
  source: /note="Description of Artificial Sequence: Synthetic oligonucleotide"
  source: /note="Description of Combined DNA/RNA Molecule: Synthetic oligonucleotide"
  source: /note="DNA/RNA"
  modified_base (1)..(1): 5-methyl modified nucleotide
  modified_base (13)..(13): 5-methyl modified nucleotide
  modified_base (16)..(16): bicyclic nucleic acid (BNA)
  modified_base (17)..(17): bicyclic nucleic acid (BNA)
  source: /note="3' tri-ethylene glycol (TEG)"
caaggaagauggcautt

SEQ ID NO: 20015 - DNA, 16 bp, Artificial Sequence
  source: /note="Description of Artificial Sequence: Synthetic oligonucleotide"
  source: /note="Description of Combined DNA/RNA Molecule: Synthetic oligonucleotide"
  source: /note="DNA/RNA"
  modified_base (1)..(1): 5-methyl modified nucleotide
  modified_base (13)..(13): 5-methyl modified nucleotide
  modified_base (15)..(15): bicyclic nucleic acid (BNA)
  modified_base (16)..(16): bicyclic nucleic acid (BNA)
  source: /note="3' tri-ethylene glycol (TEG)"
caaggaagauggcatt

SEQ ID NO: 20016 - DNA, 15 bp, Artificial Sequence
  source: /note="Description of Artificial Sequence: Synthetic oligonucleotide"
  source: /note="Description of Combined DNA/RNA Molecule: Synthetic oligonucleotide"
  source: /note="DNA/RNA"
  modified_base (1)..(1): 5-methyl modified nucleotide
  modified_base (13)..(13): 5-methyl modified nucleotide
  modified_base (14)..(14): bicyclic nucleic acid (BNA)
  modified_base (15)..(15): bicyclic nucleic acid (BNA)
  source: /note="3' tri-ethylene glycol (TEG)"
caaggaagauggcat

SEQ ID NO: 20017 - RNA, 14 nt, Artificial Sequence
  source: /note="Description of Artificial Sequence: Synthetic oligonucleotide"
  source: /note="RNA"
  modified_base (1)..(1): 5-methyl modified nucleotide
  modified_base (13)..(13): 5-methyl bicyclic nucleic acid
  modified_base (14)..(14): bicyclic nucleic acid (BNA)
  source: /note="3' tri-ethylene glycol (TEG)"
caaggaagauggca

SEQ ID NO: 20018 - RNA, 13 nt, Artificial Sequence
  source: /note="Description of Artificial Sequence: Synthetic oligonucleotide"
  source: /note="RNA"
  modified_base (1)..(1): 5-methyl modified nucleotide
  modified_base (12)..(12): bicyclic nucleic acid (BNA)
  modified_base (13)..(13): 5-methyl bicyclic nucleic acid
  source: /note="3' tri-ethylene glycol (TEG)"
caaggaagauggc

SEQ ID NO: 20019 - RNA, 12 nt, Artificial Sequence
  source: /note="Description of Artificial Sequence: Synthetic oligonucleotide"
  source: /note="RNA"
  modified_base (1)..(1): 5-methyl modified nucleotide
  modified_base (11)..(11): bicyclic nucleic acid (BNA)
  modified_base (12)..(12): bicyclic nucleic acid (BNA)
  source: /note="3' tri-ethylene glycol (TEG)"
caaggaagaugg

SEQ ID NO: 20020 - DNA, 11 bp, Artificial Sequence
  source: /note="Description of Artificial Sequence: Synthetic oligonucleotide"
  source: /note="DNA/RNA"
  modified_base (1)..(1): 5-methyl modified nucleotide
  modified_base (10)..(10): bicyclic nucleic acid (BNA)
  modified_base (11)..(11): bicyclic nucleic acid (BNA)
  source: /note="3' tri-ethylene glycol (TEG)"
caaggaagatg

SEQ ID NO: 20021 - DNA, 10 bp, Artificial Sequence
  source: /note="Description of Artificial Sequence: Synthetic oligonucleotide"
  source: /note="DNA/RNA"
  modified_base (1)..(1): 5-methyl modified nucleotide
  modified_base (9)..(9): bicyclic nucleic acid (BNA)
  modified_base (10)..(10): bicyclic nucleic acid (BNA)
  source: /note="3' tri-ethylene glycol (TEG)"
caaggaagat

SEQ ID NO: 20022 - RNA, 9 nt, Artificial Sequence
  source: /note="Description of Artificial Sequence: Synthetic oligonucleotide"
  source: /note="RNA/Antisense Oligonucleotide"
  modified_base (1)..(1): 5-methyl modified nucleotide
  modified_base (8)..(8): bicyclic nucleic acid (BNA)
  modified_base (9)..(9): bicyclic nucleic acid (BNA)
  source: /note="3' tri-ethylene glycol (TEG)"
caaggaaga

SEQ ID NO: 20023 - RNA, 8 nt, Artificial Sequence
  source: /note="Description of Artificial Sequence: Synthetic oligonucleotide"
  source: /note="RNA/Antisense Oligonucleotide"
  modified_base (1)..(1): 5-methyl modified nucleotide
  modified_base (7)..(7): bicyclic nucleic acid (BNA)
  modified_base (8)..(8): bicyclic nucleic acid (BNA)
  source: /note="3' tri-ethylene glycol (TEG)"
caaggaag

SEQ ID NO: 20024 - RNA, 20 nt, Artificial Sequence
  source: /note="Description of Artificial Sequence: Synthetic oligonucleotide"
  source: /note="RNA"
  modified_base (12)..(12): 5-methyl modified nucleotide
  modified_base (17)..(17): 5-methyl modified nucleotide
  modified_base (19)..(19): bicyclic nucleic acid (BNA)
  modified_base (20)..(20): bicyclic nucleic acid (BNA)
  source: /note="3' tri-ethylene glycol (TEG)"
aaggaagauggcauuucuag

SEQ ID NO: 20025 - DNA, 19 bp, Artificial Sequence
  source: /note="Description of Artificial Sequence: Synthetic oligonucleotide"
  source: /note="Description of Combined DNA/RNA Molecule: Synthetic oligonucleotide"
  source: /note="DNA/RNA"
  modified_base (12)..(12): 5-methyl modified nucleotide
  modified_base (17)..(17): 5-methyl modified nucleotide
  modified_base (18)..(18): bicyclic nucleic acid (BNA)
  modified_base (19)..(19): bicyclic nucleic acid (BNA)
  source: /note="3' tri-ethylene glycol (TEG)"
aaggaagauggcauuucta

SEQ ID NO: 20026 - DNA, 18 bp, Artificial Sequence
  source: /note="Description of Artificial Sequence: Synthetic oligonucleotide"
  source: /note="Description of Combined DNA/RNA Molecule: Synthetic oligonucleotide"
  source: /note="DNA/RNA"
  modified_base (12)..(12): 5-methyl modified nucleotide
  modified_base (17)..(17): 5-methyl bicyclic nucleic acid
  modified_base (18)..(18): bicyclic nucleic acid (BNA)
  source: /note="3' tri-ethylene glycol (TEG)"
aaggaagauggcauuuct

SEQ ID NO: 20027 - DNA, 17 bp, Artificial Sequence
  source: /note="Description of Artificial Sequence: Synthetic oligonucleotide"
  source: /note="Description of Combined DNA/RNA Molecule: Synthetic oligonucleotide"
  source: /note="DNA/RNA"
  modified_base (12)..(12): 5-methyl modified nucleotide
  modified_base (16)..(16): bicyclic nucleic acid (BNA)
  modified_base (17)..(17): 5-methyl bicyclic nucleic acid
  source: /note="3' tri-ethylene glycol (TEG)"
aaggaagauggcauutc

SEQ ID NO: 20028 - DNA, 16 bp, Artificial Sequence
  source: /note="Description of Artificial Sequence: Synthetic oligonucleotide"
  source: /note="Description of Combined DNA/RNA Molecule: Synthetic oligonucleotide"
  source: /note="DNA/RNA"
  modified_base (12)..(12): 5-methyl modified nucleotide
  modified_base (15)..(15): bicyclic nucleic acid (BNA)
  modified_base (16)..(16): bicyclic nucleic acid (BNA)
  source: /note="3' tri-ethylene glycol (TEG)"
aaggaagauggcautt

SEQ ID NO: 20029 - DNA, 15 bp, Artificial Sequence
  source: /note="Description of Artificial Sequence: Synthetic oligonucleotide"
  source: /note="Description of Combined DNA/RNA Molecule: Synthetic oligonucleotide"
  source: /note="DNA/RNA"
  modified_base (12)..(12): 5-methyl modified nucleotide
  modified_base (14)..(14): bicyclic nucleic acid (BNA)
  modified_base (15)..(15): bicyclic nucleic acid (BNA)
  source: /note="3' tri-ethylene glycol (TEG)"
aaggaagauggcatt

SEQ ID NO: 20030 - DNA, 14 bp, Artificial Sequence
  source: /note="Description of Artificial Sequence: Synthetic oligonucleotide"
  source: /note="Description of Combined DNA/RNA Molecule: Synthetic oligonucleotide"
  source: /note="DNA/RNA"
  modified_base (12)..(12): 5-methyl modified nucleotide
  modified_base (13)..(13): bicyclic nucleic acid (BNA)
  modified_base (14)..(14): bicyclic nucleic acid (BNA)
  source: /note="3' tri-ethylene glycol (TEG)"
aaggaagauggcat

SEQ ID NO: 20031 - RNA, 13 nt, Artificial Sequence
  source: /note="Description of Artificial Sequence: Synthetic oligonucleotide"
  source: /note="RNA"
  modified_base (12)..(12): 5-methyl bicyclic nucleic acid
  modified_base (13)..(13): bicyclic nucleic acid (BNA)
  source: /note="3' tri-ethylene glycol (TEG)"
aaggaagauggca

SEQ ID NO: 20032 - RNA, 12 nt, Artificial Sequence
  source: /note="Description of Artificial Sequence: Synthetic oligonucleotide"
  source: /note="RNA"
  modified_base (11)..(11): bicyclic nucleic acid (BNA)
  modified_base (12)..(12): 5-methyl bicyclic nucleic acid
  source: /note="3' tri-ethylene glycol (TEG)"
aaggaagauggc

SEQ ID NO: 20033 - RNA, 11 nt, Artificial Sequence
  source: /note="Description of Artificial Sequence: Synthetic oligonucleotide"
  source: /note="RNA"
  modified_base (10)..(10): bicyclic nucleic acid (BNA)
  modified_base (11)..(11): bicyclic nucleic acid (BNA)
  source: /note="3' tri-ethylene glycol (TEG)"
aaggaagaugg

SEQ ID NO: 20034 - DNA, 10 bp, Artificial Sequence
  source: /note="Description of Artificial Sequence: Synthetic oligonucleotide"
  source: /note="DNA/RNA"
  modified_base (9)..(9): bicyclic nucleic acid (BNA)
  modified_base (10)..(10): bicyclic nucleic acid (BNA)
  source: /note="3' tri-ethylene glycol (TEG)"
aaggaagatg

SEQ ID NO: 20035 - DNA, 9 bp, Artificial Sequence
  source: /note="Description of Artificial Sequence: Synthetic oligonucleotide"
  source: /note="DNA/RNA"
  modified_base (8)..(8): bicyclic nucleic acid (BNA)
  modified_base (9)..(9): bicyclic nucleic acid (BNA)
  source: /note="3' tri-ethylene glycol (TEG)"
aaggaagat

SEQ ID NO: 20036 - RNA, 8 nt, Artificial Sequence
  source: /note="Description of Artificial Sequence: Synthetic oligonucleotide"
  source: /note="RNA/Antisense Oligonucleotide"
  modified_base (7)..(7): bicyclic nucleic acid (BNA)
  modified_base (8)..(8): bicyclic nucleic acid (BNA)
  source: /note="3' tri-ethylene glycol (TEG)"
aaggaaga

SEQ ID NO: 20037 - RNA, 19 nt, Artificial Sequence
  source: /note="Description of Artificial Sequence: Synthetic oligonucleotide"
  source: /note="RNA"
  modified_base (11)..(11): 5-methyl modified nucleotide
  modified_base (16)..(16): 5-methyl modified nucleotide
  modified_base (18)..(18): bicyclic nucleic acid (BNA)
  modified_base (19)..(19): bicyclic nucleic acid (BNA)
  source: /note="3' tri-ethylene glycol (TEG)"
aggaagauggcauuucuag

SEQ ID NO: 20038 - DNA, 18 bp, Artificial Sequence
  source: /note="Description of Artificial Sequence: Synthetic oligonucleotide"
  source: /note="Description of Combined DNA/RNA Molecule: Synthetic oligonucleotide"
  source: /note="DNA/RNA"
  modified_base (11)..(11): 5-methyl modified nucleotide
  modified_base (16)..(16): 5-methyl modified nucleotide
  modified_base (17)..(17): bicyclic nucleic acid (BNA)
  modified_base (18)..(18): bicyclic nucleic acid (BNA)
  source: /note="3' tri-ethylene glycol (TEG)"
aggaagauggcauuucta

SEQ ID NO: 20039 - DNA, 17 bp, Artificial Sequence
  source: /note="Description of Artificial Sequence: Synthetic oligonucleotide"
  source: /note="Description of Combined DNA/RNA Molecule: Synthetic oligonucleotide"
  source: /note="DNA/RNA"
  modified_base (11)..(11): 5-methyl modified nucleotide
  modified_base (16)..(16): 5-methyl bicyclic nucleic acid
  modified_base (17)..(17): bicyclic nucleic acid (BNA)
  source: /note="3' tri-ethylene glycol (TEG)"
aggaagauggcauuuct

SEQ ID NO: 20040 - DNA, 16 bp, Artificial Sequence
  source: /note="Description of Artificial Sequence: Synthetic oligonucleotide"
  source: /note="Description of Combined DNA/RNA Molecule: Synthetic oligonucleotide"
  source: /note="DNA/RNA"
  modified_base (11)..(11): 5-methyl modified nucleotide
  modified_base (15)..(15): bicyclic nucleic acid (BNA)
  modified_base (16)..(16): 5-methyl bicyclic nucleic acid
  source: /note="3' tri-ethylene glycol (TEG)"
aggaagauggcauutc

SEQ ID NO: 20041 - DNA, 15 bp, Artificial Sequence
  source: /note="Description of Artificial Sequence: Synthetic oligonucleotide"
  source: /note="Description of Combined DNA/RNA Molecule: Synthetic oligonucleotide"
  source: /note="DNA/RNA"
  modified_base (11)..(11): 5-methyl modified nucleotide
  modified_base (14)..(14): bicyclic nucleic acid (BNA)
  modified_base (15)..(15): bicyclic nucleic acid (BNA)
  source: /note="3' tri-ethylene glycol (TEG)"
aggaagauggcautt

SEQ ID NO: 20042 - DNA, 14 bp, Artificial Sequence
  source: /note="Description of Artificial Sequence: Synthetic oligonucleotide"
  source: /note="Description of Combined DNA/RNA Molecule: Synthetic oligonucleotide"
  source: /note="DNA/RNA"
  modified_base (11)..(11): 5-methyl modified nucleotide
  modified_base (13)..(13): bicyclic nucleic acid (BNA)
  modified_base (14)..(14): bicyclic nucleic acid (BNA)
  source: /note="3' tri-ethylene glycol (TEG)"
aggaagauggcatt

SEQ ID NO: 20043 - DNA, 13 bp, Artificial Sequence
  source: /note="Description of Artificial Sequence: Synthetic oligonucleotide"
  source: /note="Description of Combined DNA/RNA Molecule: Synthetic oligonucleotide"
  source: /note="DNA/RNA"
  modified_base (11)..(11): 5-methyl modified nucleotide
  modified_base (12)..(12): bicyclic nucleic acid (BNA)
  modified_base (13)..(13): bicyclic nucleic acid (BNA)
  source: /note="3' tri-ethylene glycol (TEG)"
aggaagauggcat

SEQ ID NO: 20044 - RNA, 12 nt, Artificial Sequence
  source: /note="Description of Artificial Sequence: Synthetic oligonucleotide"
  source: /note="RNA"
  modified_base (11)..(11): 5-methyl bicyclic nucleic acid
  modified_base (12)..(12): bicyclic nucleic acid (BNA)
  source: /note="3' tri-ethylene glycol (TEG)"
aggaagauggca

SEQ ID NO: 20045 - RNA, 10 nt, Artificial Sequence
  source: /note="Description of Artificial Sequence: Synthetic oligonucleotide"
  source: /note="RNA"
  modified_base (9)..(9): bicyclic nucleic acid (BNA)
  modified_base (10)..(10): bicyclic nucleic acid (BNA)
  source: /note="3' tri-ethylene glycol (TEG)"
aggaagaugg

SEQ ID NO: 20046 - DNA, 9 bp, Artificial Sequence
  source: /note="Description of Artificial Sequence: Synthetic oligonucleotide"
  source: /note="DNA/RNA"
  modified_base (8)..(8): bicyclic nucleic acid (BNA)
  modified_base (9)..(9): bicyclic nucleic acid (BNA)
  source: /note="3' tri-ethylene glycol (TEG)"
aggaagatg

SEQ ID NO: 20047 - DNA, 8 bp, Artificial Sequence
  source: /note="Description of Artificial Sequence: Synthetic oligonucleotide"
  source: /note="DNA/RNA"
  modified_base (7)..(7): bicyclic nucleic acid (BNA)
  modified_base (8)..(8): bicyclic nucleic acid (BNA)
  source: /note="3' tri-ethylene glycol (TEG)"
aggaagat

SEQ ID NO: 20048 - RNA, 18 nt, Artificial Sequence
  source: /note="Description of Artificial Sequence: Synthetic oligonucleotide"
  source: /note="RNA"
  modified_base (10)..(10): 5-methyl modified nucleotide
  modified_base (15)..(15): 5-methyl modified nucleotide
  modified_base (17)..(17): bicyclic nucleic acid (BNA)
  modified_base (18)..(18): bicyclic nucleic acid (BNA)
  source: /note="3' tri-ethylene glycol (TEG)"
ggaagauggcauuucuag

SEQ ID NO: 20049 - DNA, 17 bp, Artificial Sequence
  source: /note="Description of Artificial Sequence: Synthetic oligonucleotide"
  source: /note="Description of Combined DNA/RNA Molecule: Synthetic oligonucleotide"
  source: /note="DNA/RNA"
  modified_base (10)..(10): 5-methyl modified nucleotide
  modified_base (15)..(15): 5-methyl modified nucleotide
  modified_base (16)..(16): bicyclic nucleic acid (BNA)
  modified_base (17)..(17): bicyclic nucleic acid (BNA)
  source: /note="3' tri-ethylene glycol (TEG)"
ggaagauggcauuucta

SEQ ID NO: 20050 - DNA, 16 bp, Artificial Sequence
  source: /note="Description of Artificial Sequence: Synthetic oligonucleotide"
  source: /note="Description of Combined DNA/RNA Molecule: Synthetic oligonucleotide"
  source: /note="DNA/RNA"
  modified_base (10)..(10): 5-methyl modified nucleotide
  modified_base (15)..(15): 5-methyl bicyclic nucleic acid
  modified_base (16)..(16): bicyclic nucleic acid (BNA)
  source: /note="3' tri-ethylene glycol (TEG)"
ggaagauggcauuuct

SEQ ID NO: 20051 - DNA, 15 bp, Artificial Sequence
  source: /note="Description of Artificial Sequence: Synthetic oligonucleotide"
  source: /note="Description of Combined DNA/RNA Molecule: Synthetic oligonucleotide"
  source: /note="DNA/RNA"
  modified_base (10)..(10): 5-methyl modified nucleotide
  modified_base (14)..(14): bicyclic nucleic acid (BNA)
  modified_base (15)..(15): 5-methyl bicyclic nucleic acid
  source: /note="3' tri-ethylene glycol (TEG)"
ggaagauggcauutc

SEQ ID NO: 20052 - DNA, 14 bp, Artificial Sequence
  source: /note="Description of Artificial Sequence: Synthetic oligonucleotide"
  source: /note="Description of Combined DNA/RNA Molecule: Synthetic oligonucleotide"
  source: /note="DNA/RNA"
  modified_base (10)..(10): 5-methyl modified nucleotide
  modified_base (13)..(13): bicyclic nucleic acid (BNA)
  modified_base (14)..(14): bicyclic nucleic acid (BNA)
  source: /note="3' tri-ethylene glycol (TEG)"
ggaagauggcautt

SEQ ID NO: 20053 - DNA, 13 bp, Artificial Sequence
  source: /note="Description of Artificial Sequence: Synthetic oligonucleotide"
  source: /note="Description of Combined DNA/RNA Molecule: Synthetic oligonucleotide"
  source: /note="DNA/RNA"
  modified_base (10)..(10): 5-methyl modified nucleotide
  modified_base (12)..(12): bicyclic nucleic acid (BNA)
  modified_base (13)..(13): bicyclic nucleic acid (BNA)
  source: /note="3' tri-ethylene glycol (TEG)"
ggaagauggcatt

SEQ ID NO: 20054 - DNA, 12 bp, Artificial Sequence
  source: /note="Description of Artificial Sequence: Synthetic oligonucleotide"
  source: /note="Description of Combined DNA/RNA Molecule: Synthetic oligonucleotide"
  source: /note="DNA/RNA"
  modified_base (10)..(10): 5-methyl modified nucleotide
  modified_base (11)..(11): bicyclic nucleic acid (BNA)
  modified_base (12)..(12): bicyclic nucleic acid (BNA)
  source: /note="3' tri-ethylene glycol (TEG)"
ggaagauggcat

SEQ ID NO: 20055 - RNA, 11 nt, Artificial Sequence
  source: /note="Description of Artificial Sequence: Synthetic oligonucleotide"
  source: /note="RNA"
  modified_base (10)..(10): 5-methyl bicyclic nucleic acid
  modified_base (11)..(11): bicyclic nucleic acid (BNA)
  source: /note="3' tri-ethylene glycol (TEG)"
ggaagauggca

SEQ ID NO: 20056 - RNA, 10 nt, Artificial Sequence
  source: /note="Description of Artificial Sequence: Synthetic oligonucleotide"
  source: /note="RNA"
  modified_base (9)..(9): bicyclic nucleic acid (BNA)
  modified_base (10)..(10): 5-methyl bicyclic nucleic acid
  source: /note="3' tri-ethylene glycol (TEG)"
ggaagauggc

SEQ ID NO: 20057 - DNA, 8 bp, Artificial Sequence
  source: /note="Description of Artificial Sequence: Synthetic oligonucleotide"
  source: /note="DNA/RNA"
  modified_base (7)..(7): bicyclic nucleic acid (BNA)
  modified_base (8)..(8): bicyclic nucleic acid (BNA)
  source: /note="3' tri-ethylene glycol (TEG)"
ggaagatg

SEQ ID NO: 20058 - RNA, 17 nt, Artificial Sequence
  source: /note="Description of Artificial Sequence: Synthetic oligonucleotide"
  source: /note="RNA"
  modified_base (9)..(9): 5-methyl modified nucleotide
  modified_base (14)..(14): 5-methyl modified nucleotide
  modified_base (16)..(16): bicyclic nucleic acid (BNA)
  modified_base (17)..(17): bicyclic nucleic acid (BNA)
  source: /note="3' tri-ethylene glycol (TEG)"
gaagauggcauuucuag

SEQ ID NO: 20059 - DNA, 16 bp, Artificial Sequence
  source: /note="Description of Artificial Sequence: Synthetic oligonucleotide"
  source: /note="Description of Combined DNA/RNA Molecule: Synthetic oligonucleotide"
  source: /note="DNA/RNA"
  modified_base (9)..(9): 5-methyl modified nucleotide
  modified_base (14)..(14): 5-methyl modified nucleotide
  modified_base (15)..(15): bicyclic nucleic acid (BNA)
  modified_base (16)..(16): bicyclic nucleic acid (BNA)
  source: /note="3' tri-ethylene glycol (TEG)"
gaagauggcauuucta

SEQ ID NO: 20060 - DNA, 14 bp, Artificial Sequence
  source: /note="Description of Artificial Sequence: Synthetic oligonucleotide"
  source: /note="Description of Combined DNA/RNA Molecule: Synthetic oligonucleotide"
  source: /note="DNA/RNA"
  modified_base (9)..(9): 5-methyl modified nucleotide
  modified_base (13)..(13): bicyclic nucleic acid (BNA)
  modified_base (14)..(14): 5-methyl bicyclic nucleic acid
  source: /note="3' tri-ethylene glycol (TEG)"
gaagauggcauutc

SEQ ID NO: 20061 - DNA, 13 bp, Artificial Sequence
  source: /note="Description of Artificial Sequence: Synthetic oligonucleotide"
  source: /note="Description of Combined DNA/RNA Molecule: Synthetic oligonucleotide"
  source: /note="DNA/RNA"
  modified_base (9)..(9): 5-methyl modified nucleotide
  modified_base (12)..(12): bicyclic nucleic acid (BNA)
  modified_base (13)..(13): bicyclic nucleic acid (BNA)
  source: /note="3' tri-ethylene glycol (TEG)"
gaagauggcautt

SEQ ID NO: 20062 - DNA, 12 bp, Artificial Sequence
  source: /note="Description of Artificial Sequence: Synthetic oligonucleotide"
  source: /note="Description of Combined DNA/RNA Molecule: Synthetic oligonucleotide"
  source: /note="DNA/RNA"
  modified_base (9)..(9): 5-methyl modified nucleotide
  modified_base (11)..(11): bicyclic nucleic acid (BNA)
  modified_base (12)..(12): bicyclic nucleic acid (BNA)
  source: /note="3' tri-ethylene glycol (TEG)"
gaagauggcatt

SEQ ID NO: 20063 - DNA, 11 bp, Artificial Sequence
  source: /note="Description of Artificial Sequence: Synthetic oligonucleotide"
  source: /note="Description of Combined DNA/RNA Molecule: Synthetic oligonucleotide"
  source: /note="DNA/RNA"
  modified_base (9)..(9): 5-methyl modified nucleotide
  modified_base (10)..(10): bicyclic nucleic acid (BNA)
  modified_base (11)..(11): bicyclic nucleic acid (BNA)
  source: /note="3' tri-ethylene glycol (TEG)"
gaagauggcat

SEQ ID NO: 20064 - RNA, 10 nt, Artificial Sequence
  source: /note="Description of Artificial Sequence: Synthetic oligonucleotide"
  source: /note="RNA"
  modified_base (9)..(9): 5-methyl bicyclic nucleic acid
  modified_base (10)..(10): bicyclic nucleic acid (BNA)
  source: /note="3' tri-ethylene glycol (TEG)"
gaagauggca

SEQ ID NO: 20065 - RNA, 9 nt, Artificial Sequence
  source: /note="Description of Artificial Sequence: Synthetic oligonucleotide"
  source: /note="RNA"
  modified_base (8)..(8): bicyclic nucleic acid (BNA)
  modified_base (9)..(9): 5-methyl bicyclic nucleic acid
  source: /note="3' tri-ethylene glycol (TEG)"
gaagauggc

SEQ ID NO: 20066 - RNA, 8 nt, Artificial Sequence
  source: /note="Description of Artificial Sequence: Synthetic oligonucleotide"
  source: /note="RNA"
  modified_base (7)..(7): bicyclic nucleic acid (BNA)
  modified_base (8)..(8): bicyclic nucleic acid (BNA)
  source: /note="3' tri-ethylene glycol (TEG)"
gaagaugg

SEQ ID NO: 20067 - RNA, 16 nt, Artificial Sequence
  source: /note="Description of Artificial Sequence: Synthetic oligonucleotide"
  source: /note="RNA"
  modified_base (8)..(8): 5-methyl modified nucleotide
  modified_base (13)..(13): 5-methyl modified nucleotide
  modified_base (15)..(15): bicyclic nucleic acid (BNA)
  modified_base (16)..(16): bicyclic nucleic acid (BNA)
  source: /note="3' tri-ethylene glycol (TEG)"
aagauggcauuucuag

SEQ ID NO: 20068 - DNA, 15 bp, Artificial Sequence
  source: /note="Description of Artificial Sequence: Synthetic oligonucleotide"
  source: /note="Description of Combined DNA/RNA Molecule: Synthetic oligonucleotide"
  source: /note="DNA/RNA"
  modified_base (8)..(8): 5-methyl modified nucleotide
  modified_base (13)..(13): 5-methyl modified nucleotide
  modified_base (14)..(14): bicyclic nucleic acid (BNA)
  modified_base (15)..(15): bicyclic nucleic acid (BNA)
  source: /note="3' tri-ethylene glycol (TEG)"
aagauggcauuucta

SEQ ID NO: 20069 - DNA, 14 bp, Artificial Sequence
  source: /note="Description of Artificial Sequence: Synthetic oligonucleotide"
  source: /note="Description of Combined DNA/RNA Molecule: Synthetic oligonucleotide"
  source: /note="DNA/RNA"
  modified_base (8)..(8): 5-methyl modified nucleotide
  modified_base (13)..(13): 5-methyl bicyclic nucleic acid
  modified_base (14)..(14): bicyclic nucleic acid (BNA)
  source: /note="3' tri-ethylene glycol (TEG)"
aagauggcauuuct

SEQ ID NO: 20070 - DNA, 13 bp, Artificial Sequence
  source: /note="Description of Artificial Sequence: Synthetic oligonucleotide"
  source: /note="Description of Combined DNA/RNA Molecule: Synthetic oligonucleotide"
  source: /note="DNA/RNA"
  modified_base (8)..(8): 5-methyl modified nucleotide
  modified_base (12)..(12): bicyclic nucleic acid (BNA)
  modified_base (13)..(13): 5-methyl bicyclic nucleic acid
  source: /note="3' tri-ethylene glycol (TEG)"
aagauggcauutc

SEQ ID NO: 20071 - DNA, 12 bp, Artificial Sequence
  source: /note="Description of Artificial Sequence: Synthetic oligonucleotide"
  source: /note="Description of Combined DNA/RNA Molecule: Synthetic oligonucleotide"
  source: /note="DNA/RNA"
  modified_base (8)..(8): 5-methyl modified nucleotide
  modified_base (11)..(11): bicyclic nucleic acid (BNA)
  modified_base (12)..(12): bicyclic nucleic acid (BNA)
  source: /note="3' tri-ethylene glycol (TEG)"
aagauggcautt

SEQ ID NO: 20072 - DNA, 11 bp, Artificial Sequence
  source: /note="Description of Artificial Sequence: Synthetic oligonucleotide"
  source: /note="Description of Combined DNA/RNA Molecule: Synthetic oligonucleotide"
  source: /note="DNA/RNA"
  modified_base (8)..(8): 5-methyl modified nucleotide
  modified_base (10)..(10): bicyclic nucleic acid (BNA)
  modified_base (11)..(11): bicyclic nucleic acid (BNA)
  source: /note="3' tri-ethylene glycol (TEG)"
aagauggcatt

SEQ ID NO: 20073 - DNA, 10 bp, Artificial Sequence
  source: /note="Description of Artificial Sequence: Synthetic oligonucleotide"
  source: /note="Description of Combined DNA/RNA Molecule: Synthetic oligonucleotide"
  source: /note="DNA/RNA"
  modified_base (8)..(8): 5-methyl modified nucleotide
  modified_base (9)..(9): bicyclic nucleic acid (BNA)
  modified_base (10)..(10): bicyclic nucleic acid (BNA)
  source: /note="3' tri-ethylene glycol (TEG)"
aagauggcat

SEQ ID NO: 20074 - RNA, 9 nt, Artificial Sequence
  source: /note="Description of Artificial Sequence: Synthetic oligonucleotide"
  source: /note="RNA"
  modified_base (8)..(8): 5-methyl bicyclic nucleic acid
  modified_base (9)..(9): bicyclic nucleic acid (BNA)
  source: /note="3' tri-ethylene glycol (TEG)"
aagauggca

SEQ ID NO: 20075 - RNA, 8 nt, Artificial Sequence
  source: /note="Description of Artificial Sequence: Synthetic oligonucleotide"
  source: /note="RNA"
  modified_base (7)..(7): bicyclic nucleic acid (BNA)
  modified_base (8)..(8): 5-methyl bicyclic nucleic acid
  source: /note="3' tri-ethylene glycol (TEG)"
aagauggc

SEQ ID NO: 20076 - RNA, 15 nt, Artificial Sequence
  source: /note="Description of Artificial Sequence: Synthetic oligonucleotide"
  source: /note="RNA"
  modified_base (7)..(7): 5-methyl modified nucleotide
  modified_base (12)..(12): 5-methyl modified nucleotide
  modified_base (14)..(14): bicyclic nucleic acid (BNA)
  modified_base (15)..(15): bicyclic nucleic acid (BNA)
  source: /note="3' tri-ethylene glycol (TEG)"
agauggcauuucuag

SEQ ID NO: 20077 - DNA, 14 bp, Artificial Sequence
  source: /note="Description of Artificial Sequence: Synthetic oligonucleotide"
  source: /note="Description of Combined DNA/RNA Molecule: Synthetic oligonucleotide"
  source: /note="DNA/RNA"
  modified_base (7)..(7): 5-methyl modified nucleotide
  modified_base (12)..(12): 5-methyl modified nucleotide
  modified_base (13)..(13): bicyclic nucleic acid (BNA)
  modified_base (14)..(14): bicyclic nucleic acid (BNA)
  source: /note="3' tri-ethylene glycol (TEG)"
agauggcauuucta

SEQ ID NO: 20078 - DNA, 13 bp, Artificial Sequence
  source: /note="Description of Artificial Sequence: Synthetic oligonucleotide"
  source: /note="Description of Combined DNA/RNA Molecule: Synthetic oligonucleotide"
  source: /note="DNA/RNA"
  modified_base (7)..(7): 5-methyl modified nucleotide
  modified_base (12)..(12): 5-methyl bicyclic nucleic acid
  modified_base (13)..(13): bicyclic nucleic acid (BNA)
  source: /note="3' tri-ethylene glycol (TEG)"
agauggcauuuct

SEQ ID NO: 20079 - DNA, 12 bp, Artificial Sequence
  source: /note="Description of Artificial Sequence: Synthetic oligonucleotide"
  source: /note="Description of Combined DNA/RNA Molecule: Synthetic oligonucleotide"
  source: /note="DNA/RNA"
  modified_base (7)..(7): 5-methyl modified nucleotide
  modified_base (11)..(11): bicyclic nucleic acid (BNA)
  modified_base (12)..(12): 5-methyl bicyclic nucleic acid
  source: /note="3' tri-ethylene glycol (TEG)"
agauggcauutc

SEQ ID NO: 20080 - DNA, 11 bp, Artificial Sequence
  source: /note="Description of Artificial Sequence: Synthetic oligonucleotide"
  source: /note="Description of Combined DNA/RNA Molecule: Synthetic oligonucleotide"
  source: /note="DNA/RNA"
  modified_base (7)..(7): 5-methyl modified nucleotide
  modified_base (10)..(10): bicyclic nucleic acid (BNA)
  modified_base (11)..(11): bicyclic nucleic acid (BNA)
  source: /note="3' tri-ethylene glycol (TEG)"
agauggcautt

SEQ ID NO: 20081 - DNA, 10 bp, Artificial Sequence
  source: /note="Description of Artificial Sequence: Synthetic oligonucleotide"
  source: /note="Description of Combined DNA/RNA Molecule: Synthetic oligonucleotide"
  source: /note="DNA/RNA"
  modified_base (7)..(7): 5-methyl modified nucleotide
  modified_base (9)..(9): bicyclic nucleic acid (BNA)
  modified_base (10)..(10): bicyclic nucleic acid (BNA)
  source: /note="3' tri-ethylene glycol (TEG)"
agauggcatt

SEQ ID NO: 20082 - DNA, 9 bp, Artificial Sequence
  source: /note="Description of Artificial Sequence: Synthetic oligonucleotide"
  source: /note="Description of Combined DNA/RNA Molecule: Synthetic oligonucleotide"
  source: /note="DNA/RNA"
  modified_base (7)..(7): 5-methyl modified nucleotide
  modified_base (8)..(8): bicyclic nucleic acid (BNA)
  modified_base (9)..(9): bicyclic nucleic acid (BNA)
  source: /note="3' tri-ethylene glycol (TEG)"
agauggcat

SEQ ID NO: 20083 - RNA, 8 nt, Artificial Sequence
  source: /note="Description of Artificial Sequence: Synthetic oligonucleotide"
  source: /note="RNA"
  modified_base (7)..(7): 5-methyl bicyclic nucleic acid
  modified_base (8)..(8): bicyclic nucleic acid (BNA)
  source: /note="3' tri-ethylene glycol (TEG)"
agauggca

SEQ ID NO: 20084 - RNA, 30 nt, Artificial Sequence; identical to SEQ ID NO: 284
  source: /note="Description of Artificial Sequence: Synthetic oligonucleotide"
  source: /note="RNA"
  modified_base (1)..(1): 5-methyl modified nucleotide
  modified_base (3)..(3): 5-methyl modified nucleotide
  modified_base (4)..(4): 5-methyl modified nucleotide
  modified_base (7)..(7): 5-methyl modified nucleotide
  modified_base (10)..(10): 5-methyl modified nucleotide
  modified_base (22)..(22): 5-methyl modified nucleotide
  modified_base (27)..(27): 5-methyl modified nucleotide
  modified_base (29)..(29): bicyclic nucleic acid (BNA)
  modified_base (30)..(30): bicyclic nucleic acid (BNA)
  source: /note="3' tri-ethylene glycol (TEG)"

SEQ ID NO: 20085 - DNA, 29 bp, Artificial Sequence
  source: /note="Description of Artificial Sequence: Synthetic oligonucleotide"
  source: /note="Description of Combined DNA/RNA Molecule: Synthetic oligonucleotide"
  source: /note="DNA/RNA"
  modified_base (1)..(1): 5-methyl modified nucleotide
  modified_base (3)..(3): 5-methyl modified nucleotide
  modified_base (4)..(4): 5-methyl modified nucleotide
  modified_base (7)..(7): 5-methyl modified nucleotide
  modified_base (10)..(10): 5-methyl modified nucleotide
  modified_base (22)..(22): 5-methyl modified nucleotide
  modified_base (27)..(27): 5-methyl modified nucleotide
  modified_base (28)..(28): bicyclic nucleic acid (BNA)
  modified_base (29)..(29): bicyclic nucleic acid (BNA)
  source: /note="3' tri-ethylene glycol (TEG)"
cuccaacaucaaggaagauggcauuucta

SEQ ID NO: 20086 - DNA, 28 bp, Artificial Sequence
  source: /note="Description of Artificial Sequence: Synthetic oligonucleotide"
  source: /note="Description of Combined DNA/RNA Molecule: Synthetic oligonucleotide"
  source: /note="DNA/RNA"
  modified_base (1)..(1): 5-methyl modified nucleotide
  modified_base (3)..(3): 5-methyl modified nucleotide
  modified_base (4)..(4): 5-methyl modified nucleotide
  modified_base (7)..(7): 5-methyl modified nucleotide
  modified_base (10)..(10): 5-methyl modified nucleotide
  modified_base (22)..(22): 5-methyl modified nucleotide
  modified_base (27)..(27): 5-methyl bicyclic nucleic acid
  modified_base (28)..(28): bicyclic nucleic acid (BNA)
  source: /note="3' tri-ethylene glycol (TEG)"
cuccaacaucaaggaagauggcauuuct

SEQ ID NO: 20087 - DNA, 27 bp, Artificial Sequence
  source: /note="Description of Artificial Sequence: Synthetic oligonucleotide"
  source: /note="Description of Combined DNA/RNA Molecule: Synthetic oligonucleotide"
  source: /note="DNA/RNA"
  modified_base (1)..(1): 5-methyl modified nucleotide
  modified_base (3)..(3): 5-methyl modified nucleotide
  modified_base (4)..(4): 5-methyl modified nucleotide
  modified_base (7)..(7): 5-methyl modified nucleotide
  modified_base (10)..(10): 5-methyl modified nucleotide
  modified_base (22)..(22): 5-methyl modified nucleotide
  modified_base (26)..(26): bicyclic nucleic acid (BNA)
  modified_base (27)..(27): 5-methyl bicyclic nucleic acid
  source: /note="3' tri-ethylene glycol (TEG)"
cuccaacaucaaggaagauggcauutc

SEQ ID NO: 20088 - DNA, 26 bp, Artificial Sequence
  source: /note="Description of Artificial Sequence: Synthetic oligonucleotide"
  source: /note="Description of Combined DNA/RNA Molecule: Synthetic oligonucleotide"
  source: /note="DNA/RNA"
  modified_base (1)..(1): 5-methyl modified nucleotide
  modified_base (3)..(3): 5-methyl modified nucleotide
  modified_base (4)..(4): 5-methyl modified nucleotide
  modified_base (7)..(7): 5-methyl modified nucleotide
  modified_base (10)..(10): 5-methyl modified nucleotide
  modified_base (22)..(22): 5-methyl modified nucleotide
  modified_base (25)..(25): bicyclic nucleic acid (BNA)
  modified_base (26)..(26): bicyclic nucleic acid (BNA)
  source: /note="3' tri-ethylene glycol (TEG)"
cuccaacaucaaggaagauggcautt

SEQ ID NO: 20089 - DNA, 25 bp, Artificial Sequence
  source: /note="Description of Artificial Sequence: Synthetic oligonucleotide"
  source: /note="Description of Combined DNA/RNA Molecule: Synthetic oligonucleotide"
  source: /note="DNA/RNA"
  modified_base (1)..(1): 5-methyl modified nucleotide
  modified_base (3)..(3): 5-methyl modified nucleotide
  modified_base (4)..(4): 5-methyl modified nucleotide
  modified_base (7)..(7): 5-methyl modified nucleotide
  modified_base (10)..(10): 5-methyl modified nucleotide
  modified_base (22)..(22): 5-methyl modified nucleotide
  modified_base (24)..(24): bicyclic nucleic acid (BNA)
  modified_base (25)..(25): bicyclic nucleic acid (BNA)
  source: /note="3' tri-ethylene glycol (TEG)"
cuccaacaucaaggaagauggcatt

SEQ ID NO: 20090 - DNA, 24 bp, Artificial Sequence
  source: /note="Description of Artificial Sequence: Synthetic oligonucleotide"
  source: /note="Description of Combined DNA/RNA Molecule: Synthetic oligonucleotide"
  source: /note="DNA/RNA"
  modified_base (1)..(1): 5-methyl modified nucleotide
  modified_base (3)..(3): 5-methyl modified nucleotide
  modified_base (4)..(4): 5-methyl modified nucleotide
  modified_base (7)..(7): 5-methyl modified nucleotide
  modified_base (10)..(10): 5-methyl modified nucleotide
  modified_base (22)..(22): 5-methyl modified nucleotide
  modified_base (23)..(23): bicyclic nucleic acid (BNA)
  modified_base (24)..(24): bicyclic nucleic acid (BNA)
  source: /note="3' tri-ethylene glycol (TEG)"
cuccaacaucaaggaagauggcat

SEQ ID NO: 20091 - RNA, 23 nt, Artificial Sequence
  source: /note="Description of Artificial Sequence: Synthetic oligonucleotide"
  source: /note="RNA"
  modified_base (1)..(1): 5-methyl modified nucleotide
  modified_base (3)..(3): 5-methyl modified nucleotide
  modified_base (4)..(4): 5-methyl modified nucleotide
  modified_base (7)..(7): 5-methyl modified nucleotide
  modified_base (10)..(10): 5-methyl modified nucleotide
  modified_base (22)..(22): 5-methyl bicyclic nucleic acid
  modified_base (23)..(23): bicyclic nucleic acid (BNA)
  source: /note="3' tri-ethylene glycol (TEG)"
cuccaacaucaaggaagauggca

SEQ ID NO: 20092 - RNA, 22 nt, Artificial Sequence
  source: /note="Description of Artificial Sequence: Synthetic oligonucleotide"
  source: /note="RNA"
  modified_base (1)..(1): 5-methyl modified nucleotide
  modified_base (3)..(3): 5-methyl modified nucleotide
  modified_base (4)..(4): 5-methyl modified nucleotide
  modified_base (7)..(7): 5-methyl modified nucleotide
  modified_base (10)..(10): 5-methyl modified nucleotide
  modified_base (21)..(21): bicyclic nucleic acid (BNA)
  modified_base (22)..(22): 5-methyl bicyclic nucleic acid
  source: /note="3' tri-ethylene glycol (TEG)"
cuccaacaucaaggaagauggc

SEQ ID NO: 20093 - RNA, 21 nt, Artificial Sequence
  source: /note="Description of Artificial Sequence: Synthetic oligonucleotide"
  source: /note="RNA"
  modified_base (1)..(1): 5-methyl modified nucleotide
  modified_base (3)..(3): 5-methyl modified nucleotide
  modified_base (4)..(4): 5-methyl modified nucleotide
  modified_base (7)..(7): 5-methyl modified nucleotide
  modified_base (10)..(10): 5-methyl modified nucleotide
  modified_base (20)..(20): bicyclic nucleic acid (BNA)
  modified_base (21)..(21): bicyclic nucleic acid (BNA)
  source: /note="3' tri-ethylene glycol (TEG)"
cuccaacaucaaggaagaugg

SEQ ID NO: 20094 - DNA, 20 bp, Artificial Sequence
  source: /note="Description of Artificial Sequence: Synthetic oligonucleotide"
  source: /note="Description of Combined DNA/RNA Molecule: Synthetic oligonucleotide"
  source: /note="DNA/RNA"
  modified_base (1)..(1): 5-methyl modified nucleotide
  modified_base (3)..(3): 5-methyl modified nucleotide
  modified_base (4)..(4): 5-methyl modified nucleotide
  modified_base (7)..(7): 5-methyl modified nucleotide
  modified_base (10)..(10): 5-methyl modified nucleotide
  modified_base (19)..(19): bicyclic nucleic acid (BNA)
  modified_base (20)..(20): bicyclic nucleic acid (BNA)
  source: /note="3' tri-ethylene glycol (TEG)"
cuccaacaucaaggaagatg

SEQ ID NO: 20095 - DNA, 19 bp, Artificial Sequence
  source: /note="Description of Artificial Sequence: Synthetic oligonucleotide"
  source: /note="Description of Combined DNA/RNA Molecule: Synthetic oligonucleotide"
  source: /note="DNA/RNA"
  modified_base (1)..(1): 5-methyl modified nucleotide
  modified_base (3)..(3): 5-methyl modified nucleotide
  modified_base (4)..(4): 5-methyl modified nucleotide
  modified_base (7)..(7): 5-methyl modified nucleotide
  modified_base (10)..(10): 5-methyl modified nucleotide
  modified_base (18)..(18): bicyclic nucleic acid (BNA)
  modified_base (19)..(19): bicyclic nucleic acid (BNA)
  source: /note="3' tri-ethylene glycol (TEG)"
cuccaacaucaaggaagat

SEQ ID NO: 20096 - RNA, 18 nt, Artificial Sequence
  source: /note="Description of Artificial Sequence: Synthetic oligonucleotide"
  source: /note="RNA"
  modified_base (1)..(1): 5-methyl modified nucleotide
  modified_base (3)..(3): 5-methyl modified nucleotide
  modified_base (4)..(4): 5-methyl modified nucleotide
  modified_base (7)..(7): 5-methyl modified nucleotide
  modified_base (10)..(10): 5-methyl modified nucleotide
  modified_base (17)..(17): bicyclic nucleic acid (BNA)
  modified_base (18)..(18): bicyclic nucleic acid (BNA)
  source: /note="3' tri-ethylene glycol (TEG)"
cuccaacaucaaggaaga

SEQ ID NO: 20097 - RNA, 17 nt, Artificial Sequence
  source: /note="Description of Artificial Sequence: Synthetic oligonucleotide"
  source: /note="RNA"
  modified_base (1)..(1): 5-methyl modified nucleotide
  modified_base (3)..(3): 5-methyl modified nucleotide
  modified_base (4)..(4): 5-methyl modified nucleotide
  modified_base (7)..(7): 5-methyl modified nucleotide
  modified_base (10)..(10): 5-methyl modified nucleotide
  modified_base (16)..(16): bicyclic nucleic acid (BNA)
  modified_base (17)..(17): bicyclic nucleic acid (BNA)
  source: /note="3' tri-ethylene glycol (TEG)"
cuccaacaucaaggaag

SEQ ID NO: 20098 - RNA, 29 nt, Artificial Sequence
  source: /note="Description of Artificial Sequence: Synthetic oligonucleotide"
  source: /note="RNA"
  modified_base (2)..(2): 5-methyl modified nucleotide
  modified_base (3)..(3): 5-methyl modified nucleotide
  modified_base (6)..(6): 5-methyl modified nucleotide
  modified_base (9)..(9): 5-methyl modified nucleotide
  modified_base (21)..(21): 5-methyl modified nucleotide
  modified_base (26)..(26): 5-methyl modified nucleotide
  modified_base (28)..(28): bicyclic nucleic acid (BNA)
  modified_base (29)..(29): bicyclic nucleic acid (BNA)
  source: /note="3' tri-ethylene glycol (TEG)"
uccaacaucaaggaagauggcauuucuag

SEQ ID NO: 20099 - DNA, 28 bp, Artificial Sequence
  source: /note="Description of Artificial Sequence: Synthetic oligonucleotide"
  source: /note="Description of Combined DNA/RNA Molecule: Synthetic oligonucleotide"
  source: /note="DNA/RNA"
  modified_base (2)..(2): 5-methyl modified nucleotide
  modified_base (3)..(3): 5-methyl modified nucleotide
  modified_base (6)..(6): 5-methyl modified nucleotide
  modified_base (9)..(9): 5-methyl modified nucleotide
  modified_base (21)..(21): 5-methyl modified nucleotide
  modified_base (26)..(26): 5-methyl modified nucleotide
  modified_base (27)..(27): bicyclic nucleic acid (BNA)
  modified_base (28)..(28): bicyclic nucleic acid (BNA)
  source: /note="3' tri-ethylene glycol (TEG)"
uccaacaucaaggaagauggcauuucta

SEQ ID NO: 20100 - DNA, 27 bp, Artificial Sequence
  source: /note="Description of Artificial Sequence: Synthetic oligonucleotide"
  source: /note="Description of Combined DNA/RNA Molecule: Synthetic oligonucleotide"
  source: /note="DNA/RNA"
  modified_base (2)..(2): 5-methyl modified nucleotide
  modified_base (3)..(3): 5-methyl modified nucleotide
  modified_base (6)..(6): 5-methyl modified nucleotide
  modified_base (9)..(9): 5-methyl modified nucleotide
  modified_base (21)..(21): 5-methyl modified nucleotide
  modified_base (26)..(26): 5-methyl bicyclic nucleic acid
  modified_base (27)..(27): bicyclic nucleic acid (BNA)
  source: /note="3' tri-ethylene glycol (TEG)"
uccaacaucaaggaagauggcauuuct

SEQ ID NO: 20101 - DNA, 26 bp, Artificial Sequence
  source: /note="Description of Artificial Sequence: Synthetic oligonucleotide"
  source: /note="Description of Combined DNA/RNA Molecule: Synthetic oligonucleotide"
  source: /note="DNA/RNA"
  modified_base (2)..(2): 5-methyl modified nucleotide
  modified_base (3)..(3): 5-methyl modified nucleotide
  modified_base (6)..(6): 5-methyl modified nucleotide
  modified_base (9)..(9): 5-methyl modified nucleotide
  modified_base (21)..(21): 5-methyl modified nucleotide
  modified_base (25)..(25): bicyclic nucleic acid (BNA)
  modified_base (26)..(26): 5-methyl bicyclic nucleic acid
  source: /note="3' tri-ethylene glycol (TEG)"
uccaacaucaaggaagauggcauutc

SEQ ID NO: 20102 - DNA, 25 bp, Artificial Sequence
  source: /note="Description of Artificial Sequence: Synthetic oligonucleotide"
  source: /note="Description of Combined DNA/RNA Molecule: Synthetic oligonucleotide"
  source: /note="DNA/RNA"
  modified_base (2)..(2): 5-methyl modified nucleotide
  modified_base (3)..(3): 5-methyl modified nucleotide
  modified_base (6)..(6): 5-methyl modified nucleotide
  modified_base (9)..(9): 5-methyl modified nucleotide
  modified_base (21)..(21): 5-methyl modified nucleotide
  modified_base (24)..(24): bicyclic nucleic acid (BNA)
  modified_base (25)..(25): bicyclic nucleic acid (BNA)
  source: /note="3' tri-ethylene glycol (TEG)"
uccaacaucaaggaagauggcautt

SEQ ID NO: 20103 - DNA, 24 bp, Artificial Sequence
  source: /note="Description of Artificial Sequence: Synthetic oligonucleotide"
  source: /note="Description of Combined DNA/RNA Molecule: Synthetic oligonucleotide"
  source: /note="DNA/RNA"
  modified_base (2)..(2): 5-methyl modified nucleotide
  modified_base (3)..(3): 5-methyl modified nucleotide
  modified_base (6)..(6): 5-methyl modified nucleotide
  modified_base (9)..(9): 5-methyl modified nucleotide
  modified_base (21)..(21): 5-methyl modified nucleotide
  modified_base (23)..(23): bicyclic nucleic acid (BNA)
  modified_base (24)..(24): bicyclic nucleic acid (BNA)
  source: /note="3' tri-ethylene glycol (TEG)"
uccaacaucaaggaagauggcatt

SEQ ID NO: 20104 - DNA, 23 bp, Artificial Sequence
  source: /note="Description of Artificial Sequence: Synthetic oligonucleotide"
  source: /note="Description of Combined DNA/RNA Molecule: Synthetic oligonucleotide"
  source: /note="DNA/RNA"
  modified_base (2)..(2): 5-methyl modified nucleotide
  modified_base (3)..(3): 5-methyl modified nucleotide
  modified_base (6)..(6): 5-methyl modified nucleotide
  modified_base (9)..(9): 5-methyl modified nucleotide
  modified_base (21)..(21): 5-methyl modified nucleotide
  modified_base (22)..(22): bicyclic nucleic acid (BNA)
  modified_base (23)..(23): bicyclic nucleic acid (BNA)
  source: /note="3' tri-ethylene glycol (TEG)"
uccaacaucaaggaagauggcat

SEQ ID NO: 20105 - RNA, 22 nt, Artificial Sequence
  source: /note="Description of Artificial Sequence: Synthetic oligonucleotide"
  source: /note="RNA"
  modified_base (2)..(2): 5-methyl modified nucleotide
  modified_base (3)..(3): 5-methyl modified nucleotide
  modified_base (6)..(6): 5-methyl modified nucleotide
  modified_base (9)..(9): 5-methyl modified nucleotide
  modified_base (21)..(21): 5-methyl bicyclic nucleic acid
  modified_base (22)..(22): bicyclic nucleic acid (BNA)
  source: /note="3' tri-ethylene glycol (TEG)"
uccaacaucaaggaagauggca

SEQ ID NO: 20106 - RNA, 21 nt, Artificial Sequence
  source: /note="Description of Artificial Sequence: Synthetic oligonucleotide"
  source: /note="RNA"
  modified_base (2)..(2): 5-methyl modified nucleotide
  modified_base (3)..(3): 5-methyl modified nucleotide
  modified_base (6)..(6): 5-methyl modified nucleotide
  modified_base (9)..(9): 5-methyl modified nucleotide
  modified_base (20)..(20): bicyclic nucleic acid (BNA)
  modified_base (21)..(21): 5-methyl bicyclic nucleic acid
  source: /note="3' tri-ethylene glycol (TEG)"
uccaacaucaaggaagauggc

SEQ ID NO: 20107 - RNA, 20 nt, Artificial Sequence
  source: /note="Description of Artificial Sequence: Synthetic oligonucleotide"
  source: /note="RNA"
  modified_base (2)..(2): 5-methyl modified nucleotide
  modified_base (3)..(3): 5-methyl modified nucleotide
  modified_base (6)..(6): 5-methyl modified nucleotide
  modified_base (9)..(9): 5-methyl modified nucleotide
  modified_base (19)..(19): bicyclic nucleic acid (BNA)
  modified_base (20)..(20): bicyclic nucleic acid (BNA)
  source: /note="3' tri-ethylene glycol (TEG)"
uccaacaucaaggaagaugg

SEQ ID NO: 20108 - DNA, 19 bp, Artificial Sequence
  source: /note="Description of Artificial Sequence: Synthetic oligonucleotide"
  source: /note="Description of Combined DNA/RNA Molecule: Synthetic oligonucleotide"
  source: /note="DNA/RNA"
  modified_base (2)..(2): 5-methyl modified nucleotide
  modified_base (3)..(3): 5-methyl modified nucleotide
  modified_base (6)..(6): 5-methyl modified nucleotide
  modified_base (9)..(9): 5-methyl modified nucleotide
  modified_base (18)..(18): bicyclic nucleic acid (BNA)
  modified_base (19)..(19): bicyclic nucleic acid (BNA)
  source: /note="3' tri-ethylene glycol (TEG)"
uccaacaucaaggaagatg

SEQ ID NO: 20109 - DNA, 18 bp, Artificial Sequence
  source: /note="Description of Artificial Sequence: Synthetic oligonucleotide"
  source: /note="Description of Combined DNA/RNA Molecule: Synthetic oligonucleotide"
  source: /note="DNA/RNA"
  modified_base (2)..(2): 5-methyl modified nucleotide
  modified_base (3)..(3): 5-methyl modified nucleotide
  modified_base (6)..(6): 5-methyl modified nucleotide
  modified_base (9)..(9): 5-methyl modified nucleotide
  modified_base (17)..(17): bicyclic nucleic acid (BNA)
  modified_base (18)..(18): bicyclic nucleic acid (BNA)
  source: /note="3' tri-ethylene glycol (TEG)"
uccaacaucaaggaagat

SEQ ID NO: 20110 - RNA, 17 nt, Artificial Sequence
  source: /note="Description of Artificial Sequence: Synthetic oligonucleotide"
  source: /note="RNA"
  modified_base (2)..(2): 5-methyl modified nucleotide
  modified_base (3)..(3): 5-methyl modified nucleotide
  modified_base (6)..(6): 5-methyl modified nucleotide
  modified_base (9)..(9): 5-methyl modified nucleotide
  modified_base (16)..(16): bicyclic nucleic acid (BNA)
  modified_base (17)..(17): bicyclic nucleic acid (BNA)
  source: /note="3' tri-ethylene glycol (TEG)"
uccaacaucaaggaaga

SEQ ID NO: 20111 - RNA, 16 nt, Artificial Sequence
  source: /note="Description of Artificial Sequence: Synthetic oligonucleotide"
  source: /note="RNA"
  modified_base (2)..(2): 5-methyl modified nucleotide
  modified_base (3)..(3): 5-methyl modified nucleotide
  modified_base (6)..(6): 5-methyl modified nucleotide
  modified_base (9)..(9): 5-methyl modified nucleotide
  modified_base (15)..(15): bicyclic nucleic acid (BNA)
  modified_base (16)..(16): bicyclic nucleic acid (BNA)
  source: /note="3' tri-ethylene glycol (TEG)"
uccaacaucaaggaag

SEQ ID NO: 20112 - RNA, 28 nt, Artificial Sequence
  source: /note="Description of Artificial Sequence: Synthetic oligonucleotide"
  source: /note="RNA"
  modified_base (1)..(1): 5-methyl modified nucleotide
  modified_base (2)..(2): 5-methyl modified nucleotide
  modified_base (5)..(5): 5-methyl modified nucleotide
  modified_base (8)..(8): 5-methyl modified nucleotide
  modified_base (20)..(20): 5-methyl modified nucleotide
  modified_base (25)..(25): 5-methyl modified nucleotide
  modified_base (27)..(27): bicyclic nucleic acid (BNA)
  modified_base (28)..(28): bicyclic nucleic acid (BNA)
  source: /note="3' tri-ethylene glycol (TEG)"
ccaacaucaaggaagauggcauuucuag

SEQ ID NO: 20113 - DNA, 27 bp, Artificial Sequence
  source: /note="Description of Artificial Sequence: Synthetic oligonucleotide"
  source: /note="Description of Combined DNA/RNA Molecule: Synthetic oligonucleotide"
  source: /note="DNA/RNA"
  modified_base (1)..(1): 5-methyl modified nucleotide
  modified_base (2)..(2): 5-methyl modified nucleotide
  modified_base (5)..(5): 5-methyl modified nucleotide
  modified_base (8)..(8): 5-methyl modified nucleotide
  modified_base (20)..(20): 5-methyl modified nucleotide
  modified_base (25)..(25): 5-methyl modified nucleotide
  modified_base (26)..(26): bicyclic nucleic acid (BNA)
  modified_base (27)..(27): bicyclic nucleic acid (BNA)
  source: /note="3' tri-ethylene glycol (TEG)"
ccaacaucaaggaagauggcauuucta

SEQ ID NO: 20114 - DNA, 26 bp, Artificial Sequence
  source: /note="Description of Artificial Sequence: Synthetic oligonucleotide"
  source: /note="Description of Combined DNA/RNA Molecule: Synthetic oligonucleotide"
  source: /note="DNA/RNA"
  modified_base (1)..(1): 5-methyl modified nucleotide
  modified_base (2)..(2): 5-methyl modified nucleotide
  modified_base (5)..(5): 5-methyl modified nucleotide
  modified_base (8)..(8): 5-methyl modified nucleotide
  modified_base (20)..(20): 5-methyl modified nucleotide
  modified_base (25)..(25): 5-methyl bicyclic nucleic acid
  modified_base (26)..(26): bicyclic nucleic acid (BNA)
  source: /note="3' tri-ethylene glycol (TEG)"
ccaacaucaaggaagauggcauuuct

SEQ ID NO: 20115 - DNA, 25 bp, Artificial Sequence
  source: /note="Description of Artificial Sequence: Synthetic oligonucleotide"
  source: /note="Description of Combined DNA/RNA Molecule: Synthetic oligonucleotide"
  source: /note="DNA/RNA"
  modified_base (1)..(1): 5-methyl modified nucleotide
  modified_base (2)..(2): 5-methyl modified nucleotide
  modified_base (5)..(5): 5-methyl modified nucleotide
  modified_base (8)..(8): 5-methyl modified nucleotide
  modified_base (20)..(20): 5-methyl modified nucleotide
  modified_base (24)..(24): bicyclic nucleic acid (BNA)
  modified_base (25)..(25): 5-methyl bicyclic nucleic acid
  source: /note="3' tri-ethylene glycol (TEG)"
ccaacaucaaggaagauggcauutc

SEQ ID NO: 20116 - DNA, 24 bp, Artificial Sequence
  source: /note="Description of Artificial Sequence: Synthetic oligonucleotide"
  source: /note="Description of Combined DNA/RNA Molecule: Synthetic oligonucleotide"
  source: /note="DNA/RNA"
  modified_base (1)..(1): 5-methyl modified nucleotide
  modified_base (2)..(2): 5-methyl modified nucleotide
  modified_base (5)..(5): 5-methyl modified nucleotide
  modified_base (8)..(8): 5-methyl modified nucleotide
  modified_base (20)..(20): 5-methyl modified nucleotide
  modified_base (23)..(23): bicyclic nucleic acid (BNA)
  modified_base (24)..(24): bicyclic nucleic acid (BNA)
  source: /note="3' tri-ethylene glycol (TEG)"
ccaacaucaaggaagauggcautt

SEQ ID NO: 20117 - DNA, 23 bp, Artificial Sequence
  source: /note="Description of Artificial Sequence: Synthetic oligonucleotide"
  source: /note="Description of Combined DNA/RNA Molecule: Synthetic oligonucleotide"
  source: /note="DNA/RNA"
  modified_base (1)..(1): 5-methyl modified nucleotide
  modified_base (2)..(2): 5-methyl modified nucleotide
  modified_base (5)..(5): 5-methyl modified nucleotide
  modified_base (8)..(8): 5-methyl modified nucleotide
  modified_base (20)..(20): 5-methyl modified nucleotide
  modified_base (22)..(22): bicyclic nucleic acid (BNA)
  modified_base (23)..(23): bicyclic nucleic acid (BNA)
  source: /note="3' tri-ethylene glycol (TEG)"
ccaacaucaaggaagauggcatt

SEQ ID NO: 20118 - DNA, 22 bp, Artificial Sequence
  source: /note="Description of Artificial Sequence: Synthetic oligonucleotide"
  source: /note="Description of Combined DNA/RNA Molecule: Synthetic oligonucleotide"
  source: /note="DNA/RNA"
  modified_base (1)..(1): 5-methyl modified nucleotide
  modified_base (2)..(2): 5-methyl modified nucleotide
  modified_base (5)..(5): 5-methyl modified nucleotide
  modified_base (8)..(8): 5-methyl modified nucleotide
  modified_base (20)..(20): 5-methyl modified nucleotide
  modified_base (21)..(21): bicyclic nucleic acid (BNA)
  modified_base (22)..(22): bicyclic nucleic acid (BNA)
  source: /note="3' tri-ethylene glycol (TEG)"
ccaacaucaaggaagauggcat

SEQ ID NO: 20119 - RNA, 21 nt, Artificial Sequence
  source: /note="Description of Artificial Sequence: Synthetic oligonucleotide"
  source: /note="RNA"
  modified_base (1)..(1): 5-methyl modified nucleotide
  modified_base (2)..(2): 5-methyl modified nucleotide
  modified_base (5)..(5): 5-methyl modified nucleotide
  modified_base (8)..(8): 5-methyl modified nucleotide
  modified_base (20)..(20): 5-methyl bicyclic nucleic acid
  modified_base (21)..(21): bicyclic nucleic acid (BNA)
  source: /note="3' tri-ethylene glycol (TEG)"
ccaacaucaaggaagauggca

SEQ ID NO: 20120 - RNA, 20 nt, Artificial Sequence
  source: /note="Description of Artificial Sequence: Synthetic oligonucleotide"
  source: /note="RNA"
  modified_base (1)..(1): 5-methyl modified nucleotide
  modified_base (2)..(2): 5-methyl modified nucleotide
  modified_base (5)..(5): 5-methyl modified nucleotide
  modified_base (8)..(8): 5-methyl modified nucleotide
  modified_base (19)..(19): bicyclic nucleic acid (BNA)
  modified_base (20)..(20): 5-methyl bicyclic nucleic acid
  source: /note="3' tri-ethylene glycol (TEG)"
ccaacaucaaggaagauggc

SEQ ID NO: 20121 - RNA, 19 nt, Artificial Sequence
  source: /note="Description of Artificial Sequence: Synthetic oligonucleotide"
  source: /note="RNA"
  modified_base (1)..(1): 5-methyl modified nucleotide
  modified_base (2)..(2): 5-methyl modified nucleotide
  modified_base (5)..(5): 5-methyl modified nucleotide
  modified_base (8)..(8): 5-methyl modified nucleotide
  modified_base (18)..(18): bicyclic nucleic acid (BNA)
  modified_base (19)..(19): bicyclic nucleic acid (BNA)
  source: /note="3' tri-ethylene glycol (TEG)"
ccaacaucaaggaagaugg

SEQ ID NO: 20122 - DNA, 18 bp, Artificial Sequence
  source: /note="Description of Artificial Sequence: Synthetic oligonucleotide"
  source: /note="Description of Combined DNA/RNA Molecule: Synthetic oligonucleotide"
  source: /note="DNA/RNA"
  modified_base (1)..(1): 5-methyl modified nucleotide
  modified_base (2)..(2): 5-methyl modified nucleotide
  modified_base (5)..(5): 5-methyl modified nucleotide
  modified_base (8)..(8): 5-methyl modified nucleotide
  modified_base (17)..(17): bicyclic nucleic acid (BNA)
  modified_base (18)..(18): bicyclic nucleic acid (BNA)
  source: /note="3' tri-ethylene glycol (TEG)"
ccaacaucaaggaagatg

SEQ ID NO: 20123 - DNA, 17 bp, Artificial Sequence
  source: /note="Description of Artificial Sequence: Synthetic oligonucleotide"
  source: /note="Description of Combined DNA/RNA Molecule: Synthetic oligonucleotide"
  source: /note="DNA/RNA"
  modified_base (1)..(1): 5-methyl modified nucleotide
  modified_base (2)..(2): 5-methyl modified nucleotide
  modified_base (5)..(5): 5-methyl modified nucleotide
  modified_base (8)..(8): 5-methyl modified nucleotide
  modified_base (16)..(16): bicyclic nucleic acid (BNA)
  modified_base (17)..(17): bicyclic nucleic acid (BNA)
  source: /note="3' tri-ethylene glycol (TEG)"
ccaacaucaaggaagat

SEQ ID NO: 20124 - RNA, 16 nt, Artificial Sequence
  source: /note="Description of Artificial Sequence: Synthetic oligonucleotide"
  source: /note="RNA"
  modified_base (1)..(1): 5-methyl modified nucleotide
  modified_base (2)..(2): 5-methyl modified nucleotide
  modified_base (5)..(5): 5-methyl modified nucleotide
  modified_base (8)..(8): 5-methyl modified nucleotide
  modified_base (15)..(15): bicyclic nucleic acid (BNA)
  modified_base (16)..(16): bicyclic nucleic acid (BNA)
  source: /note="3' tri-ethylene glycol (TEG)"
ccaacaucaaggaaga

SEQ ID NO: 20125 - RNA, 15 nt, Artificial Sequence
  source: /note="Description of Artificial Sequence: Synthetic oligonucleotide"
  source: /note="RNA"
  modified_base (1)..(1): 5-methyl modified nucleotide
  modified_base (2)..(2): 5-methyl modified nucleotide
  modified_base (5)..(5): 5-methyl modified nucleotide
  modified_base (8)..(8): 5-methyl modified nucleotide
  modified_base (14)..(14): bicyclic nucleic acid (BNA)
  modified_base (15)..(15): bicyclic nucleic acid (BNA)
  source: /note="3' tri-ethylene glycol (TEG)"
ccaacaucaaggaag

SEQ ID NO: 20126 - RNA, 27 nt, Artificial Sequence
  source: /note="Description of Artificial Sequence: Synthetic oligonucleotide"
  source: /note="RNA"
  modified_base (1)..(1): 5-methyl modified nucleotide
  modified_base (4)..(4): 5-methyl modified nucleotide
  modified_base (7)..(7): 5-methyl modified nucleotide
  modified_base (19)..(19): 5-methyl modified nucleotide
  modified_base (24)..(24): 5-methyl modified nucleotide
  modified_base (26)..(26): bicyclic nucleic acid (BNA)
  modified_base (27)..(27): bicyclic nucleic acid (BNA)
  source: /note="3' tri-ethylene glycol (TEG)"
caacaucaaggaagauggcauuucuag

SEQ ID NO: 20127 - DNA, 26 bp, Artificial Sequence
  source: /note="Description of Artificial Sequence: Synthetic oligonucleotide"
  source: /note="Description of Combined DNA/RNA Molecule: Synthetic oligonucleotide"
  source: /note="DNA/RNA"
  modified_base (1)..(1): 5-methyl modified nucleotide
  modified_base (4)..(4): 5-methyl modified nucleotide
  modified_base (7)..(7): 5-methyl modified nucleotide
  modified_base (19)..(19): 5-methyl modified nucleotide
  modified_base (24)..(24): 5-methyl modified nucleotide
  modified_base (25)..(25): bicyclic nucleic acid (BNA)
  modified_base (26)..(26): bicyclic nucleic acid (BNA)
  source: /note="3' tri-ethylene glycol (TEG)"
caacaucaaggaagauggcauuucta

SEQ ID NO: 20128 - DNA, 25 bp, Artificial Sequence
  source: /note="Description of Artificial Sequence: Synthetic oligonucleotide"
  source: /note="Description of Combined DNA/RNA Molecule: Synthetic oligonucleotide"
  source: /note="DNA/RNA"
  modified_base (1)..(1): 5-methyl modified nucleotide
  modified_base (4)..(4): 5-methyl modified nucleotide
  modified_base (7)..(7): 5-methyl modified nucleotide
  modified_base (19)..(19): 5-methyl modified nucleotide
  modified_base (24)..(24): 5-methyl bicyclic nucleic acid
  modified_base (25)..(25): bicyclic nucleic acid (BNA)
  source: /note="3' tri-ethylene glycol (TEG)"
caacaucaaggaagauggcauuuct

SEQ ID NO: 20129 - DNA, 24 bp, Artificial Sequence
  source: /note="Description of Artificial Sequence: Synthetic oligonucleotide"
  source: /note="Description of Combined DNA/RNA Molecule: Synthetic oligonucleotide"
  source: /note="DNA/RNA"
  modified_base (1)..(1): 5-methyl modified nucleotide
  modified_base (4)..(4): 5-methyl modified nucleotide
  modified_base (7)..(7): 5-methyl modified nucleotide
  modified_base (19)..(19): 5-methyl modified nucleotide
  modified_base (23)..(23): bicyclic nucleic acid (BNA)
  modified_base (24)..(24): 5-methyl bicyclic nucleic acid
  source: /note="3' tri-ethylene glycol (TEG)"
caacaucaaggaagauggcauutc

SEQ ID NO: 20130 - DNA, 23 bp, Artificial Sequence
  source: /note="Description of Artificial Sequence: Synthetic oligonucleotide"
  source: /note="Description of Combined DNA/RNA Molecule: Synthetic oligonucleotide"
  source: /note="DNA/RNA"
  modified_base (1)..(1): 5-methyl modified nucleotide
  modified_base (4)..(4): 5-methyl modified nucleotide
  modified_base (7)..(7): 5-methyl modified nucleotide
  modified_base (19)..(19): 5-methyl modified nucleotide
  modified_base (22)..(22): bicyclic nucleic acid (BNA)
  modified_base (23)..(23): bicyclic nucleic acid (BNA)
  source: /note="3' tri-ethylene glycol (TEG)"
caacaucaaggaagauggcautt

SEQ ID NO: 20131 - DNA, 22 bp, Artificial Sequence
  source: /note="Description of Artificial Sequence: Synthetic oligonucleotide"
  source: /note="Description of Combined DNA/RNA Molecule: Synthetic oligonucleotide"
  source: /note="DNA/RNA"
  modified_base (1)..(1): 5-methyl modified nucleotide
  modified_base (4)..(4): 5-methyl modified nucleotide
  modified_base (7)..(7): 5-methyl modified nucleotide
  modified_base (19)..(19): 5-methyl modified nucleotide
  modified_base (21)..(21): bicyclic nucleic acid (BNA)
  modified_base (22)..(22): bicyclic nucleic acid (BNA)
  source: /note="3' tri-ethylene glycol (TEG)"
caacaucaaggaagauggcatt

SEQ ID NO: 20132 - DNA, 21 bp, Artificial Sequence
  source: /note="Description of Artificial Sequence: Synthetic oligonucleotide"
  source: /note="Description of Combined DNA/RNA Molecule: Synthetic oligonucleotide"
  source: /note="DNA/RNA"
  modified_base (1)..(1): 5-methyl modified nucleotide
  modified_base (4)..(4): 5-methyl modified nucleotide
  modified_base (7)..(7): 5-methyl modified nucleotide
  modified_base (19)..(19): 5-methyl modified nucleotide
  modified_base (20)..(20): bicyclic nucleic acid (BNA)
  modified_base (21)..(21): bicyclic nucleic acid (BNA)
  source: /note="3' tri-ethylene glycol (TEG)"
caacaucaaggaagauggcat

SEQ ID NO: 20133 - RNA, 20 nt, Artificial Sequence
  source: /note="Description of Artificial Sequence: Synthetic oligonucleotide"
  source: /note="RNA"
  modified_base (1)..(1): 5-methyl modified nucleotide
  modified_base (4)..(4): 5-methyl modified nucleotide
  modified_base (7)..(7): 5-methyl modified nucleotide
  modified_base (19)..(19): 5-methyl bicyclic nucleic acid
  modified_base (20)..(20): bicyclic nucleic acid (BNA)
  source: /note="3' tri-ethylene glycol (TEG)"
caacaucaaggaagauggca

SEQ ID NO: 20134 - RNA, 19 nt, Artificial Sequence
  source: /note="Description of Artificial Sequence: Synthetic oligonucleotide"
  source: /note="RNA"
  modified_base (1)..(1): 5-methyl modified nucleotide
  modified_base (4)..(4): 5-methyl modified nucleotide
  modified_base (7)..(7): 5-methyl modified nucleotide
  modified_base (18)..(18): bicyclic nucleic acid (BNA)
  modified_base (19)..(19): 5-methyl bicyclic nucleic acid
  source: /note="3' tri-ethylene glycol (TEG)"
caacaucaaggaagauggc

SEQ ID NO: 20135 - RNA, 18 nt, Artificial Sequence
  source: /note="Description of Artificial Sequence: Synthetic oligonucleotide"
  source: /note="RNA"
  modified_base (1)..(1): 5-methyl modified nucleotide
  modified_base (4)..(4): 5-methyl modified nucleotide
  modified_base (7)..(7): 5-methyl modified nucleotide
  modified_base (17)..(17): bicyclic nucleic acid (BNA)
  modified_base (18)..(18): bicyclic nucleic acid (BNA)
  source: /note="3' tri-ethylene glycol (TEG)"
caacaucaaggaagaugg

SEQ ID NO: 20136 - DNA, 17 bp, Artificial Sequence
  source: /note="Description of Artificial Sequence: Synthetic oligonucleotide"
  source: /note="Description of Combined DNA/RNA Molecule: Synthetic oligonucleotide"
  source: /note="DNA/RNA"
  modified_base (1)..(1): 5-methyl modified nucleotide
  modified_base (4)..(4): 5-methyl modified nucleotide
  modified_base (7)..(7): 5-methyl modified nucleotide
  modified_base (16)..(16): bicyclic nucleic acid (BNA)
  modified_base (17)..(17): bicyclic nucleic acid (BNA)
  source: /note="3' tri-ethylene glycol (TEG)"
caacaucaaggaagatg

SEQ ID NO: 20137 - DNA, 16 bp, Artificial Sequence
  source: /note="Description of Artificial Sequence: Synthetic oligonucleotide"
  source: /note="Description of Combined DNA/RNA Molecule: Synthetic oligonucleotide"
  source: /note="DNA/RNA"
  modified_base (1)..(1): 5-methyl modified nucleotide
  modified_base (4)..(4): 5-methyl modified nucleotide
  modified_base (7)..(7): 5-methyl modified nucleotide
  modified_base (15)..(15): bicyclic nucleic acid (BNA)
  modified_base (16)..(16): bicyclic nucleic acid (BNA)
  source: /note="3' tri-ethylene glycol (TEG)"
caacaucaaggaagat

SEQ ID NO: 20138 - RNA, 15 nt, Artificial Sequence
  source: /note="Description of Artificial Sequence: Synthetic oligonucleotide"
  source: /note="RNA"
  modified_base (1)..(1): 5-methyl modified nucleotide
  modified_base (4)..(4): 5-methyl modified nucleotide
  modified_base (7)..(7): 5-methyl modified nucleotide
  modified_base (14)..(14): bicyclic nucleic acid (BNA)
  modified_base (15)..(15): bicyclic nucleic acid (BNA)
  source: /note="3' tri-ethylene glycol (TEG)"
caacaucaaggaaga

SEQ ID NO: 20139 - RNA, 14 nt, Artificial Sequence
  source: /note="Description of Artificial Sequence: Synthetic oligonucleotide"
  source: /note="RNA"
  modified_base (1)..(1): 5-methyl modified nucleotide
  modified_base (4)..(4): 5-methyl modified nucleotide
  modified_base (7)..(7): 5-methyl modified nucleotide
  modified_base (13)..(13): bicyclic nucleic acid (BNA)
  modified_base (14)..(14): bicyclic nucleic acid (BNA)
  source: /note="3' tri-ethylene glycol (TEG)"
caacaucaaggaag

SEQ ID NO: 20140 - RNA, 26 nt, Artificial Sequence
  source: /note="Description of Artificial Sequence: Synthetic oligonucleotide"
  source: /note="RNA"
  modified_base (3)..(3): 5-methyl modified nucleotide
  modified_base (6)..(6): 5-methyl modified nucleotide
  modified_base (18)..(18): 5-methyl modified nucleotide
  modified_base (23)..(23): 5-methyl modified nucleotide
  modified_base (25)..(25): bicyclic nucleic acid (BNA)
  modified_base (26)..(26): bicyclic nucleic acid (BNA)
  source: /note="3' tri-ethylene glycol (TEG)"
aacaucaaggaagauggcauuucuag

SEQ ID NO: 20141 - DNA, 25 bp, Artificial Sequence
  source: /note="Description of Artificial Sequence: Synthetic oligonucleotide"
  source: /note="Description of Combined DNA/RNA Molecule: Synthetic oligonucleotide"
  source: /note="DNA/RNA"
  modified_base (3)..(3): 5-methyl modified nucleotide
  modified_base (6)..(6): 5-methyl modified nucleotide
  modified_base (18)..(18): 5-methyl modified nucleotide
  modified_base (23)..(23): 5-methyl modified nucleotide
  modified_base (24)..(24): bicyclic nucleic acid (BNA)
  modified_base (25)..(25): bicyclic nucleic acid (BNA)
  source: /note="3' tri-ethylene glycol (TEG)"
aacaucaaggaagauggcauuucta

SEQ ID NO: 20142 - DNA, 24 bp, Artificial Sequence
  source: /note="Description of Artificial Sequence: Synthetic oligonucleotide"
  source: /note="Description of Combined DNA/RNA Molecule: Synthetic oligonucleotide"
  source: /note="DNA/RNA"
  modified_base (3)..(3): 5-methyl modified nucleotide
  modified_base (6)..(6): 5-methyl modified nucleotide
  modified_base (18)..(18): 5-methyl modified nucleotide
  modified_base (23)..(23): 5-methyl bicyclic nucleic acid
  modified_base (24)..(24): bicyclic nucleic acid (BNA)
  source: /note="3' tri-ethylene glycol (TEG)"
aacaucaaggaagauggcauuuct

SEQ ID NO: 20143 - DNA, 23 bp, Artificial Sequence
  source: /note="Description of Artificial Sequence: Synthetic oligonucleotide"
  source: /note="Description of Combined DNA/RNA Molecule: Synthetic oligonucleotide"
  source: /note="DNA/RNA"
  modified_base (3)..(3): 5-methyl modified nucleotide
  modified_base (6)..(6): 5-methyl modified nucleotide
  modified_base (18)..(18): 5-methyl modified nucleotide
  modified_base (22)..(22): bicyclic nucleic acid (BNA)
  modified_base (23)..(23): 5-methyl bicyclic nucleic acid
  source: /note="3' tri-ethylene glycol (TEG)"
aacaucaaggaagauggcauutc

SEQ ID NO: 20144 - DNA, 22 bp, Artificial Sequence
  source: /note="Description of Artificial Sequence: Synthetic oligonucleotide"
  source: /note="Description of Combined DNA/RNA Molecule: Synthetic oligonucleotide"
  source: /note="DNA/RNA"
  modified_base (3)..(3): 5-methyl modified nucleotide
  modified_base (6)..(6): 5-methyl modified nucleotide
  modified_base (18)..(18): 5-methyl modified nucleotide
  modified_base (21)..(21): bicyclic nucleic acid (BNA)
  modified_base (22)..(22): bicyclic nucleic acid (BNA)
  source: /note="3' tri-ethylene glycol (TEG)"
aacaucaaggaagauggcautt

SEQ ID NO: 20145 - DNA, 21 bp, Artificial Sequence
  source: /note="Description of Artificial Sequence: Synthetic oligonucleotide"
  source: /note="Description of Combined DNA/RNA Molecule: Synthetic oligonucleotide"
  source: /note="DNA/RNA"
  modified_base (3)..(3): 5-methyl modified nucleotide
  modified_base (6)..(6): 5-methyl modified nucleotide
  modified_base (18)..(18): 5-methyl modified nucleotide
  modified_base (20)..(20): bicyclic nucleic acid (BNA)
  modified_base (21)..(21): bicyclic nucleic acid (BNA)
  source: /note="3' tri-ethylene glycol (TEG)"
aacaucaaggaagauggcatt

SEQ ID NO: 20146 - DNA, 20 bp, Artificial Sequence
  source: /note="Description of Artificial Sequence: Synthetic oligonucleotide"
  source: /note="Description of Combined DNA/RNA Molecule: Synthetic oligonucleotide"
  source: /note="DNA/RNA"
  modified_base (3)..(3): 5-methyl modified nucleotide
  modified_base (6)..(6): 5-methyl modified nucleotide
  modified_base (18)..(18): 5-methyl modified nucleotide
  modified_base (19)..(19): bicyclic nucleic acid (BNA)
  modified_base (20)..(20): bicyclic nucleic acid (BNA)
  source: /note="3' tri-ethylene glycol (TEG)"
aacaucaaggaagauggcat

SEQ ID NO: 20147 - RNA, 19 nt, Artificial Sequence
  source: /note="Description of Artificial Sequence: Synthetic oligonucleotide"
  source: /note="RNA"
  modified_base (3)..(3): 5-methyl modified nucleotide
  modified_base (6)..(6): 5-methyl modified nucleotide
  modified_base (18)..(18): 5-methyl bicyclic nucleic acid
  modified_base (19)..(19): bicyclic nucleic acid (BNA)
  source: /note="3' tri-ethylene glycol (TEG)"
aacaucaaggaagauggca

SEQ ID NO: 20148 - RNA, 18 nt, Artificial Sequence
  source: /note="Description of Artificial Sequence: Synthetic oligonucleotide"
  source: /note="RNA"
  modified_base (3)..(3): 5-methyl modified nucleotide
  modified_base (6)..(6): 5-methyl modified nucleotide
  modified_base (17)..(17): bicyclic nucleic acid (BNA)
  modified_base (18)..(18): 5-methyl bicyclic nucleic acid
  source: /note="3' tri-ethylene glycol (TEG)"
aacaucaaggaagauggc

SEQ ID NO: 20149 - RNA, 17 nt, Artificial Sequence
  source: /note="Description of Artificial Sequence: Synthetic oligonucleotide"
  source: /note="RNA"
  modified_base (3)..(3): 5-methyl modified nucleotide
  modified_base (6)..(6): 5-methyl modified nucleotide
  modified_base (16)..(16): bicyclic nucleic acid (BNA)
  modified_base (17)..(17): bicyclic nucleic acid (BNA)
  source: /note="3' tri-ethylene glycol (TEG)"
aacaucaaggaagaugg

SEQ ID NO: 20150 - DNA, 16 bp, Artificial Sequence
  source: /note="Description of Artificial Sequence: Synthetic oligonucleotide"
  source: /note="Description of Combined DNA/RNA Molecule: Synthetic oligonucleotide"
  source: /note="DNA/RNA"
  modified_base (3)..(3): 5-methyl modified nucleotide
  modified_base (6)..(6): 5-methyl modified nucleotide
  modified_base (15)..(15): bicyclic nucleic acid (BNA)
  modified_base (16)..(16): bicyclic nucleic acid (BNA)
  source: /note="3' tri-ethylene glycol (TEG)"
aacaucaaggaagatg

SEQ ID NO: 20151 - DNA, 15 bp, Artificial Sequence
  source: /note="Description of Artificial Sequence: Synthetic oligonucleotide"
  source: /note="Description of Combined DNA/RNA Molecule: Synthetic oligonucleotide"
  source: /note="DNA/RNA"
  modified_base (3)..(3): 5-methyl modified nucleotide
  modified_base (6)..(6): 5-methyl modified nucleotide
  modified_base (14)..(14): bicyclic nucleic acid (BNA)
  modified_base (15)..(15): bicyclic nucleic acid (BNA)
  source: /note="3' tri-ethylene glycol (TEG)"
aacaucaaggaagat

SEQ ID NO: 20152 - RNA, 14 nt, Artificial Sequence
  source: /note="Description of Artificial Sequence: Synthetic oligonucleotide"
  source: /note="RNA"
  modified_base (3)..(3): 5-methyl modified nucleotide
  modified_base (6)..(6): 5-methyl modified nucleotide
  modified_base (13)..(13): bicyclic nucleic acid (BNA)
  modified_base (14)..(14): bicyclic nucleic acid (BNA)
  source: /note="3' tri-ethylene glycol (TEG)"
aacaucaaggaaga

SEQ ID NO: 20153 - RNA, 13 nt, Artificial Sequence
  source: /note="Description of Artificial Sequence: Synthetic oligonucleotide"
  source: /note="RNA"
  modified_base (3)..(3): 5-methyl modified nucleotide
  modified_base (6)..(6): 5-methyl modified nucleotide
  modified_base (12)..(12): bicyclic nucleic acid (BNA)
  modified_base (13)..(13): bicyclic nucleic acid (BNA)
  source: /note="3' tri-ethylene glycol (TEG)"
aacaucaaggaag

SEQ ID NO: 20154 - RNA, 25 nt, Artificial Sequence
  source: /note="Description of Artificial Sequence: Synthetic oligonucleotide"
  source: /note="RNA"
  modified_base (2)..(2): 5-methyl modified nucleotide
  modified_base (5)..(5): 5-methyl modified nucleotide
  modified_base (17)..(17): 5-methyl modified nucleotide
  modified_base (22)..(22): 5-methyl modified nucleotide
  modified_base (24)..(24): bicyclic nucleic acid (BNA)
  modified_base (25)..(25): bicyclic nucleic acid (BNA)
  source: /note="3' tri-ethylene glycol (TEG)"
acaucaaggaagauggcauuucuag

SEQ ID NO: 20155 - DNA, 24 bp, Artificial Sequence
  source: /note="Description of Artificial Sequence: Synthetic oligonucleotide"
  source: /note="Description of Combined DNA/RNA Molecule: Synthetic oligonucleotide"
  source: /note="DNA/RNA"
  modified_base (2)..(2): 5-methyl modified nucleotide
  modified_base (5)..(5): 5-methyl modified nucleotide
  modified_base (17)..(17): 5-methyl modified nucleotide
  modified_base (22)..(22): 5-methyl modified nucleotide
  modified_base (23)..(23): bicyclic nucleic acid (BNA)
  modified_base (24)..(24): bicyclic nucleic acid (BNA)
  source: /note="3' tri-ethylene glycol (TEG)"
acaucaaggaagauggcauuucta

SEQ ID NO: 20156 - DNA, 23 bp, Artificial Sequence
  source: /note="Description of Artificial Sequence: Synthetic oligonucleotide"
  source: /note="Description of Combined DNA/RNA Molecule: Synthetic oligonucleotide"
  source: /note="DNA/RNA"
  modified_base (2)..(2): 5-methyl modified nucleotide
  modified_base (5)..(5): 5-methyl modified nucleotide
  modified_base (17)..(17): 5-methyl modified nucleotide
  modified_base (22)..(22): 5-methyl bicyclic nucleic acid
  modified_base (23)..(23): bicyclic nucleic acid (BNA)
  source: /note="3' tri-ethylene glycol (TEG)"
acaucaaggaagauggcauuuct

SEQ ID NO: 20157 - DNA, 22 bp, Artificial Sequence
  source: /note="Description of Artificial Sequence: Synthetic oligonucleotide"
  source: /note="Description of Combined DNA/RNA Molecule: Synthetic oligonucleotide"
  source: /note="DNA/RNA"
  modified_base (2)..(2): 5-methyl modified nucleotide
  modified_base (5)..(5): 5-methyl modified nucleotide
  modified_base (17)..(17): 5-methyl modified nucleotide
  modified_base (21)..(21): bicyclic nucleic acid (BNA)
  modified_base (22)..(22): 5-methyl bicyclic nucleic acid
  source: /note="3' tri-ethylene glycol (TEG)"
acaucaaggaagauggcauutc

SEQ ID NO: 20158 - DNA, 21 bp, Artificial Sequence
  source: /note="Description of Artificial Sequence: Synthetic oligonucleotide"
  source: /note="Description of Combined DNA/RNA Molecule: Synthetic oligonucleotide"
  source: /note="DNA/RNA"
  modified_base (2)..(2): 5-methyl modified nucleotide
  modified_base (5)..(5): 5-methyl modified nucleotide
  modified_base (17)..(17): 5-methyl modified nucleotide
  modified_base (20)..(20): bicyclic nucleic acid (BNA)
  modified_base (21)..(21): bicyclic nucleic acid (BNA)
  source: /note="3' tri-ethylene glycol (TEG)"
acaucaaggaagauggcautt

SEQ ID NO: 20159 - DNA, 20 bp, Artificial Sequence
  source: /note="Description of Artificial Sequence: Synthetic oligonucleotide"
  source: /note="Description of Combined DNA/RNA Molecule: Synthetic oligonucleotide"
  source: /note="DNA/RNA"
  modified_base (2)..(2): 5-methyl modified nucleotide
  modified_base (5)..(5): 5-methyl modified nucleotide
  modified_base (17)..(17): 5-methyl modified nucleotide
  modified_base (19)..(19): bicyclic nucleic acid (BNA)
  modified_base (20)..(20): bicyclic nucleic acid (BNA)
  source: /note="3' tri-ethylene glycol (TEG)"
acaucaaggaagauggcatt

SEQ ID NO: 20160 - DNA, 19 bp, Artificial Sequence
  source: /note="Description of Artificial Sequence: Synthetic oligonucleotide"
  source: /note="Description of Combined DNA/RNA Molecule: Synthetic oligonucleotide"
  source: /note="DNA/RNA"
  modified_base (2)..(2): 5-methyl modified nucleotide
  modified_base (5)..(5): 5-methyl modified nucleotide
  modified_base (17)..(17): 5-methyl modified nucleotide
  modified_base (18)..(18): bicyclic nucleic acid (BNA)
  modified_base (19)..(19): bicyclic nucleic acid (BNA)
  source: /note="3' tri-ethylene glycol (TEG)"
acaucaaggaagauggcat

SEQ ID NO: 20161 - RNA, 18 nt, Artificial Sequence
  source: /note="Description of Artificial Sequence: Synthetic oligonucleotide"
  source: /note="RNA"
  modified_base (2)..(2): 5-methyl modified nucleotide
  modified_base (5)..(5): 5-methyl modified nucleotide
  modified_base (17)..(17): 5-methyl bicyclic nucleic acid
  modified_base (18)..(18): bicyclic nucleic acid (BNA)
  source: /note="3' tri-ethylene glycol (TEG)"
acaucaaggaagauggca

SEQ ID NO: 20162 - RNA, 17 nt, Artificial Sequence
  source: /note="Description of Artificial Sequence: Synthetic oligonucleotide"
  source: /note="RNA"
  modified_base (2)..(2): 5-methyl modified nucleotide
  modified_base (5)..(5): 5-methyl modified nucleotide
  modified_base (16)..(16): bicyclic nucleic acid (BNA)
  modified_base (17)..(17): 5-methyl bicyclic nucleic acid
  source: /note="3' tri-ethylene glycol (TEG)"
acaucaaggaagauggc

SEQ ID NO: 20163 - RNA, 16 nt, Artificial Sequence
  source: /note="Description of Artificial Sequence: Synthetic oligonucleotide"
  source: /note="RNA"
  modified_base (2)..(2): 5-methyl modified nucleotide
  modified_base (5)..(5): 5-methyl modified nucleotide
  modified_base (15)..(15): bicyclic nucleic acid (BNA)
  modified_base (16)..(16): bicyclic nucleic acid (BNA)
  source: /note="3' tri-ethylene glycol (TEG)"
acaucaaggaagaugg

SEQ ID NO: 20164 - DNA, 15 bp, Artificial Sequence
  source: /note="Description of Artificial Sequence: Synthetic oligonucleotide"
  source: /note="Description of Combined DNA/RNA Molecule: Synthetic oligonucleotide"
  source: /note="DNA/RNA"
  modified_base (2)..(2): 5-methyl modified nucleotide
  modified_base (5)..(5): 5-methyl modified nucleotide
  modified_base (14)..(14): bicyclic nucleic acid (BNA)
  modified_base (15)..(15): bicyclic nucleic acid (BNA)
  source: /note="3' tri-ethylene glycol (TEG)"
acaucaaggaagatg

SEQ ID NO: 20165 - DNA, 14 bp, Artificial Sequence
  source: /note="Description of Artificial Sequence: Synthetic oligonucleotide"
  source: /note="Description of Combined DNA/RNA Molecule: Synthetic oligonucleotide"
  source: /note="DNA/RNA"
  modified_base (2)..(2): 5-methyl modified nucleotide
  modified_base (5)..(5): 5-methyl modified nucleotide
  modified_base (13)..(13): bicyclic nucleic acid (BNA)
  modified_base (14)..(14): bicyclic nucleic acid (BNA)
  source: /note="3' tri-ethylene glycol (TEG)"
acaucaaggaagat

SEQ ID NO: 20166 - RNA, 13 nt, Artificial Sequence
  source: /note="Description of Artificial Sequence: Synthetic oligonucleotide"
  source: /note="RNA"
  modified_base (2)..(2): 5-methyl modified nucleotide
  modified_base (5)..(5): 5-methyl modified nucleotide
  modified_base (12)..(12): bicyclic nucleic acid (BNA)
  modified_base (13)..(13): bicyclic nucleic acid (BNA)
  source: /note="3' tri-ethylene glycol (TEG)"
acaucaaggaaga

SEQ ID NO: 20167 - RNA, 12 nt, Artificial Sequence
  source: /note="Description of Artificial Sequence: Synthetic oligonucleotide"
  source: /note="RNA"
  modified_base (2)..(2): 5-methyl modified nucleotide
  modified_base (5)..(5): 5-methyl modified nucleotide
  modified_base (11)..(11): bicyclic nucleic acid (BNA)
  modified_base (12)..(12): bicyclic nucleic acid (BNA)
  source: /note="3' tri-ethylene glycol (TEG)"
acaucaaggaag

SEQ ID NO: 20168 - RNA, 24 nt, Artificial Sequence
  source: /note="Description of Artificial Sequence: Synthetic oligonucleotide"
  source: /note="RNA"
  modified_base (1)..(1): 5-methyl modified nucleotide
  modified_base (4)..(4): 5-methyl modified nucleotide
  modified_base (16)..(16): 5-methyl modified nucleotide
  modified_base (21)..(21): 5-methyl modified nucleotide
  modified_base (23)..(23): bicyclic nucleic acid (BNA)
  modified_base (24)..(24): bicyclic nucleic acid (BNA)
  source: /note="3' tri-ethylene glycol (TEG)"
caucaaggaagauggcauuucuag

SEQ ID NO: 20169 - DNA, 23 bp, Artificial Sequence
  source: /note="Description of Artificial Sequence: Synthetic oligonucleotide"
  source: /note="Description of Combined DNA/RNA Molecule: Synthetic oligonucleotide"
  source: /note="DNA/RNA"
  modified_base (1)..(1): 5-methyl modified nucleotide
  modified_base (4)..(4): 5-methyl modified nucleotide
  modified_base (16)..(16): 5-methyl modified nucleotide
  modified_base (21)..(21): 5-methyl modified nucleotide
  modified_base (22)..(22): bicyclic nucleic acid (BNA)
  modified_base (23)..(23): bicyclic nucleic acid (BNA)
  source: /note="3' tri-ethylene glycol (TEG)"
caucaaggaagauggcauuucta

SEQ ID NO: 20170 - DNA, 22 bp, Artificial Sequence
  source: /note="Description of Artificial Sequence: Synthetic oligonucleotide"
  source: /note="Description of Combined DNA/RNA Molecule: Synthetic oligonucleotide"
  source: /note="DNA/RNA"
  modified_base (1)..(1): 5-methyl modified nucleotide
  modified_base (4)..(4): 5-methyl modified nucleotide
  modified_base (16)..(16): 5-methyl modified nucleotide
  modified_base (21)..(21): 5-methyl bicyclic nucleic acid
  modified_base (22)..(22): bicyclic nucleic acid (BNA)
  source: /note="3' tri-ethylene glycol (TEG)"
caucaaggaagauggcauuuct

SEQ ID NO: 20171 - DNA, 21 bp, Artificial Sequence
  source: /note="Description of Artificial Sequence: Synthetic oligonucleotide"
  source: /note="Description of Combined DNA/RNA Molecule: Synthetic oligonucleotide"
  source: /note="DNA/RNA"
  modified_base (1)..(1): 5-methyl modified nucleotide
  modified_base (4)..(4): 5-methyl modified nucleotide
  modified_base (16)..(16): 5-methyl modified nucleotide
  modified_base (20)..(20): bicyclic nucleic acid (BNA)
  modified_base (21)..(21): 5-methyl bicyclic nucleic acid
  source: /note="3' tri-ethylene glycol (TEG)"
caucaaggaagauggcauutc

SEQ ID NO: 20172 - DNA, 20 bp, Artificial Sequence
  source: /note="Description of Artificial Sequence: Synthetic oligonucleotide"
  source: /note="Description of Combined DNA/RNA Molecule: Synthetic oligonucleotide"
  source: /note="DNA/RNA"
  modified_base (1)..(1): 5-methyl modified nucleotide
  modified_base (4)..(4): 5-methyl modified nucleotide
  modified_base (16)..(16): 5-methyl modified nucleotide
  modified_base (19)..(19): bicyclic nucleic acid (BNA)
  modified_base (20)..(20): bicyclic nucleic acid (BNA)
  source: /note="3' tri-ethylene glycol (TEG)"
caucaaggaagauggcautt

SEQ ID NO: 20173 - DNA, 19 bp, Artificial Sequence
  source: /note="Description of Artificial Sequence: Synthetic oligonucleotide"
  source: /note="Description of Combined DNA/RNA Molecule: Synthetic oligonucleotide"
  source: /note="DNA/RNA"
  modified_base (1)..(1): 5-methyl modified nucleotide
  modified_base (4)..(4): 5-methyl modified nucleotide
  modified_base (16)..(16): 5-methyl modified nucleotide
  modified_base (18)..(18): bicyclic nucleic acid (BNA)
  modified_base (19)..(19): bicyclic nucleic acid (BNA)
  source: /note="3' tri-ethylene glycol (TEG)"
caucaaggaagauggcatt

SEQ ID NO: 20174 - DNA, 18 bp, Artificial Sequence
  source: /note="Description of Artificial Sequence: Synthetic oligonucleotide"
  source: /note="Description of Combined DNA/RNA Molecule: Synthetic oligonucleotide"
  source: /note="DNA/RNA"
  modified_base (1)..(1): 5-methyl modified nucleotide
  modified_base (4)..(4): 5-methyl modified nucleotide
  modified_base (16)..(16): 5-methyl modified nucleotide
  modified_base (17)..(17): bicyclic nucleic acid (BNA)
  modified_base (18)..(18): bicyclic nucleic acid (BNA)
  source: /note="3' tri-ethylene glycol (TEG)"
caucaaggaagauggcat

SEQ ID NO: 20175 - RNA, 17 nt, Artificial Sequence
  source: /note="Description of Artificial Sequence: Synthetic oligonucleotide"
  source: /note="RNA"
  modified_base (1)..(1): 5-methyl modified nucleotide
  modified_base (4)..(4): 5-methyl modified nucleotide
  modified_base (16)..(16): 5-methyl bicyclic nucleic acid
  modified_base (17)..(17): bicyclic nucleic acid (BNA)
  source: /note="3' tri-ethylene glycol (TEG)"
caucaaggaagauggca

SEQ ID NO: 20176 - RNA, 16 nt, Artificial Sequence
  source: /note="Description of Artificial Sequence: Synthetic oligonucleotide"
  source: /note="RNA"
  modified_base (1)..(1): 5-methyl modified nucleotide
  modified_base (4)..(4): 5-methyl modified nucleotide
  modified_base (15)..(15): bicyclic nucleic acid (BNA)
  modified_base (16)..(16): 5-methyl bicyclic nucleic acid
  source: /note="3' tri-ethylene glycol (TEG)"
caucaaggaagauggc

SEQ ID NO: 20177 - RNA, 15 nt, Artificial Sequence
  source: /note="Description of Artificial Sequence: Synthetic oligonucleotide"
  source: /note="RNA"
  modified_base (1)..(1): 5-methyl modified nucleotide
  modified_base (4)..(4): 5-methyl modified nucleotide
  modified_base (14)..(14): bicyclic nucleic acid (BNA)
  modified_base (15)..(15): bicyclic nucleic acid (BNA)
  source: /note="3' tri-ethylene glycol (TEG)"
caucaaggaagaugg

SEQ ID NO: 20178 - DNA, 14 bp, Artificial Sequence
  source: /note="Description of Artificial Sequence: Synthetic oligonucleotide"
  source: /note="Description of Combined DNA/RNA Molecule: Synthetic oligonucleotide"
  source: /note="DNA/RNA"
  modified_base (1)..(1): 5-methyl modified nucleotide
  modified_base (4)..(4): 5-methyl modified nucleotide
  modified_base (13)..(13): bicyclic nucleic acid (BNA)
  modified_base (14)..(14): bicyclic nucleic acid (BNA)
  source: /note="3' tri-ethylene glycol (TEG)"
caucaaggaagatg

SEQ ID NO: 20179 - DNA, 13 bp, Artificial Sequence
  source: /note="Description of Artificial Sequence: Synthetic oligonucleotide"
  source: /note="Description of Combined DNA/RNA Molecule: Synthetic oligonucleotide"
  source: /note="DNA/RNA"
  modified_base (1)..(1): 5-methyl modified nucleotide
  modified_base (4)..(4): 5-methyl modified nucleotide
  modified_base (12)..(12): bicyclic nucleic acid (BNA)
  modified_base (13)..(13): bicyclic nucleic acid (BNA)
  source: /note="3' tri-ethylene glycol (TEG)"
caucaaggaagat

SEQ ID NO: 20180 - RNA, 12 nt, Artificial Sequence
  source: /note="Description of Artificial Sequence: Synthetic oligonucleotide"
  source: /note="RNA"
  modified_base (1)..(1): 5-methyl modified nucleotide
  modified_base (4)..(4): 5-methyl modified nucleotide
  modified_base (11)..(11): bicyclic nucleic acid (BNA)
  modified_base (12)..(12): bicyclic nucleic acid (BNA)
  source: /note="3' tri-ethylene glycol (TEG)"
caucaaggaaga

SEQ ID NO: 20181 - RNA, 11 nt, Artificial Sequence
  source: /note="Description of Artificial Sequence: Synthetic oligonucleotide"
  source: /note="RNA"
  modified_base (1)..(1): 5-methyl modified nucleotide
  modified_base (4)..(4): 5-methyl modified nucleotide
  modified_base (10)..(10): bicyclic nucleic acid (BNA)
  modified_base (11)..(11): bicyclic nucleic acid (BNA)
  source: /note="3' tri-ethylene glycol (TEG)"
caucaaggaag

SEQ ID NO: 20182 - RNA, 23 nt, Artificial Sequence
  source: /note="Description of Artificial Sequence: Synthetic oligonucleotide"
  source: /note="RNA"
  modified_base (3)..(3): 5-methyl modified nucleotide
  modified_base (15)..(15): 5-methyl modified nucleotide
  modified_base (20)..(20): 5-methyl modified nucleotide
  modified_base (22)..(22): bicyclic nucleic acid (BNA)
  modified_base (23)..(23): bicyclic nucleic acid (BNA)
  source: /note="3' tri-ethylene glycol (TEG)"
aucaaggaagauggcauuucuag

SEQ ID NO: 20183 - DNA, 22 bp, Artificial Sequence
  source: /note="Description of Artificial Sequence: Synthetic oligonucleotide"
  source: /note="Description of Combined DNA/RNA Molecule: Synthetic oligonucleotide"
  source: /note="DNA/RNA"
  modified_base (3)..(3): 5-methyl modified nucleotide
  modified_base (15)..(15): 5-methyl modified nucleotide
  modified_base (20)..(20): 5-methyl modified nucleotide
  modified_base (21)..(21): bicyclic nucleic acid (BNA)
  modified_base (22)..(22): bicyclic nucleic acid (BNA)
  source: /note="3' tri-ethylene glycol (TEG)"
aucaaggaagauggcauuucta

SEQ ID NO: 20184 - DNA, 21 bp, Artificial Sequence
  source: /note="Description of Artificial Sequence: Synthetic oligonucleotide"
  source: /note="Description of Combined DNA/RNA Molecule: Synthetic oligonucleotide"
  source: /note="DNA/RNA"
  modified_base (3)..(3): 5-methyl modified nucleotide
  modified_base (15)..(15): 5-methyl modified nucleotide
  modified_base (20)..(20): 5-methyl bicyclic nucleic acid
  modified_base (21)..(21): bicyclic nucleic acid (BNA)
  source: /note="3' tri-ethylene glycol (TEG)"
aucaaggaagauggcauuuct

SEQ ID NO: 20185 - DNA, 20 bp, Artificial Sequence
  source: /note="Description of Artificial Sequence: Synthetic oligonucleotide"
  source: /note="Description of Combined DNA/RNA Molecule: Synthetic oligonucleotide"
  source: /note="DNA/RNA"
  modified_base (3)..(3): 5-methyl modified nucleotide
  modified_base (15)..(15): 5-methyl modified nucleotide
  modified_base (19)..(19): bicyclic nucleic acid (BNA)
  modified_base (20)..(20): 5-methyl bicyclic nucleic acid
  source: /note="3' tri-ethylene glycol (TEG)"
aucaaggaagauggcauutc

SEQ ID NO: 20186 - DNA, 19 bp, Artificial Sequence
  source: /note="Description of Artificial Sequence: Synthetic oligonucleotide"
  source: /note="Description of Combined DNA/RNA Molecule: Synthetic oligonucleotide"
  source: /note="DNA/RNA"
  modified_base (3)..(3): 5-methyl modified nucleotide
  modified_base (15)..(15): 5-methyl modified nucleotide
  modified_base (18)..(18): bicyclic nucleic acid (BNA)
  modified_base (19)..(19): bicyclic nucleic acid (BNA)
  source: /note="3' tri-ethylene glycol (TEG)"
aucaaggaagauggcautt

SEQ ID NO: 20187 - DNA, 18 bp, Artificial Sequence
  source: /note="Description of Artificial Sequence: Synthetic oligonucleotide"
  source: /note="Description of Combined DNA/RNA Molecule: Synthetic oligonucleotide"
  source: /note="DNA/RNA"
  modified_base (3)..(3): 5-methyl modified nucleotide
  modified_base (15)..(15): 5-methyl modified nucleotide
  modified_base (17)..(17): bicyclic nucleic acid (BNA)
  modified_base (18)..(18): bicyclic nucleic acid (BNA)
  source: /note="3' tri-ethylene glycol (TEG)"
aucaaggaagauggcatt

SEQ ID NO: 20188 - DNA, 17 bp, Artificial Sequence
  source: /note="Description of Artificial Sequence: Synthetic oligonucleotide"
  source: /note="Description of Combined DNA/RNA Molecule: Synthetic oligonucleotide"
  source: /note="DNA/RNA"
  modified_base (3)..(3): 5-methyl modified nucleotide
  modified_base (15)..(15): 5-methyl modified nucleotide
  modified_base (16)..(16): bicyclic nucleic acid (BNA)
  modified_base (17)..(17): bicyclic nucleic acid (BNA)
  source: /note="3' tri-ethylene glycol (TEG)"
aucaaggaagauggcat

SEQ ID NO: 20189 - RNA, 16 nt, Artificial Sequence
  source: /note="Description of Artificial Sequence: Synthetic oligonucleotide"
  source: /note="RNA"
  modified_base (3)..(3): 5-methyl modified nucleotide
  modified_base (15)..(15): 5-methyl bicyclic nucleic acid
  modified_base (16)..(16): bicyclic nucleic acid (BNA)
  source: /note="3' tri-ethylene glycol (TEG)"
aucaaggaagauggca

SEQ ID NO: 20190 - RNA, 15 nt, Artificial Sequence
  source: /note="Description of Artificial Sequence: Synthetic oligonucleotide"
  source: /note="RNA"
  modified_base (3)..(3): 5-methyl modified nucleotide
  modified_base (14)..(14): bicyclic nucleic acid (BNA)
  modified_base (15)..(15): 5-methyl bicyclic nucleic acid
  source: /note="3' tri-ethylene glycol (TEG)"
aucaaggaagauggc

SEQ ID NO: 20191 - RNA, 14 nt, Artificial Sequence
  source: /note="Description of Artificial Sequence: Synthetic oligonucleotide"
  source: /note="RNA"
  modified_base (3)..(3): 5-methyl modified nucleotide
  modified_base (13)..(13): bicyclic nucleic acid (BNA)
  modified_base (14)..(14): bicyclic nucleic acid (BNA)
  source: /note="3' tri-ethylene glycol (TEG)"
aucaaggaagaugg

SEQ ID NO: 20192 - DNA, 13 bp, Artificial Sequence
  source: /note="Description of Artificial Sequence: Synthetic oligonucleotide"
  source: /note="Description of Combined DNA/RNA Molecule: Synthetic oligonucleotide"
  source: /note="DNA/RNA"
  modified_base (3)..(3): 5-methyl modified nucleotide
  modified_base (12)..(12): bicyclic nucleic acid (BNA)
  modified_base (13)..(13): bicyclic nucleic acid (BNA)
  source: /note="3' tri-ethylene glycol (TEG)"
aucaaggaagatg

SEQ ID NO: 20193 - DNA, 12 bp, Artificial Sequence
  source: /note="Description of Artificial Sequence: Synthetic oligonucleotide"
  source: /note="Description of Combined DNA/RNA Molecule: Synthetic oligonucleotide"
  source: /note="DNA/RNA"
  modified_base (3)..(3): 5-methyl modified nucleotide
  modified_base (11)..(11): bicyclic nucleic acid (BNA)
  modified_base (12)..(12): bicyclic nucleic acid (BNA)
  source: /note="3' tri-ethylene glycol (TEG)"
aucaaggaagat

SEQ ID NO: 20194 - RNA, 11 nt, Artificial Sequence
  source: /note="Description of Artificial Sequence: Synthetic oligonucleotide"
  source: /note="RNA"
  modified_base (3)..(3): 5-methyl modified nucleotide
  modified_base (10)..(10): bicyclic nucleic acid (BNA)
  modified_base (11)..(11): bicyclic nucleic acid (BNA)
  source: /note="3' tri-ethylene glycol (TEG)"
aucaaggaaga

SEQ ID NO: 20195 - RNA, 10 nt, Artificial Sequence
  source: /note="Description of Artificial Sequence: Synthetic oligonucleotide"
  source: /note="RNA"
  modified_base (3)..(3): 5-methyl modified nucleotide
  modified_base (9)..(9): bicyclic nucleic acid (BNA)
  modified_base (10)..(10): bicyclic nucleic acid (BNA)
  source: /note="3' tri-ethylene glycol (TEG)"
aucaaggaag

SEQ ID NO: 20196 - DNA, 23 bp, Artificial Sequence
  source: /note="Description of Artificial Sequence: Synthetic oligonucleotide"
  source: /note="Description of Combined DNA/RNA Molecule: Synthetic oligonucleotide"
  source: /note="DNA/RNA"
  modified_base (1)..(1): 5-methyl modified nucleotide
  modified_base (2)..(2): 5-methyl modified nucleotide
  modified_base (7)..(7): 5-methyl modified nucleotide
  modified_base (13)..(13): 5-methyl modified nucleotide
  modified_base (14)..(14): 5-methyl modified nucleotide
  modified_base (16)..(16): 5-methyl modified nucleotide
  modified_base (17)..(17): 5-methyl modified nucleotide
  modified_base (20)..(20): 5-methyl modified nucleotide
  modified_base (22)..(22): bicyclic nucleic acid (BNA)
  modified_base (23)..(23): 5-methyl bicyclic nucleic acid
  source: /note="3' tri-ethylene glycol (TEG)"
ccagagcagguaccuccaacatc

SEQ ID NO: 20197 - RNA, 18 nt, Artificial Sequence
  source: /note="Description of Artificial Sequence: Synthetic oligonucleotide"
  source: /note="RNA"
  modified_base (1)..(1): 5-methyl modified nucleotide
  modified_base (2)..(2): 5-methyl modified nucleotide
  modified_base (7)..(7): 5-methyl modified nucleotide
  modified_base (13)..(13): 5-methyl modified nucleotide
  modified_base (14)..(14): 5-methyl modified nucleotide
  modified_base (16)..(16): 5-methyl modified nucleotide
  modified_base (17)..(17): 5-methyl bicyclic nucleic acid
  modified_base (18)..(18): bicyclic nucleic acid (BNA)
  source: /note="3' tri-ethylene glycol (TEG)"
ccagagcagguaccucca

SEQ ID NO: 20198 - DNA, 23 bp, Artificial Sequence
  source: /note="Description of Artificial Sequence: Synthetic oligonucleotide"
  source: /note="Description of Combined DNA/RNA Molecule: Synthetic oligonucleotide"
  source: /note="DNA/RNA"
  modified_base (1)..(1): 5-methyl modified nucleotide
  modified_base (2)..(2): 5-methyl modified nucleotide
  modified_base (4)..(4): 5-methyl modified nucleotide
  modified_base (18)..(18): 5-methyl modified nucleotide
  modified_base (22)..(22): bicyclic nucleic acid (BNA)
  modified_base (23)..(23): bicyclic nucleic acid (BNA)
  source: /note="3' tri-ethylene glycol (TEG)"
ccucugugauuuuauaacuugat

SEQ ID NO: 20199 - DNA, 17 bp, Artificial Sequence
  source: /note="Description of Artificial Sequence: Synthetic oligonucleotide"
  source: /note="Description of Combined DNA/RNA Molecule: Synthetic oligonucleotide"
  source: /note="DNA/RNA"
  modified_base (2)..(2): 5-methyl modified nucleotide
  modified_base (4)..(4): 5-methyl modified nucleotide
  modified_base (5)..(5): 5-methyl modified nucleotide
  modified_base (6)..(6): 5-methyl modified nucleotide
  modified_base (8)..(8): 5-methyl modified nucleotide
  modified_base (9)..(9): 5-methyl modified nucleotide
  modified_base (12)..(12): 5-methyl modified nucleotide
  modified_base (14)..(14): 5-methyl modified nucleotide
  modified_base (15)..(15): 5-methyl modified nucleotide
  modified_base (16)..(16): 5-methyl bicyclic nucleic acid
  modified_base (17)..(17): bicyclic nucleic acid (BNA)
  source: /note="3' tri-ethylene glycol (TEG)"
ucacccaccaucaccct

SEQ ID NO: 20200 - RNA, 20 nt, Artificial Sequence
  source: /note="Description of Artificial Sequence: Synthetic oligonucleotide"
  source: /note="RNA"
  modified_base (7)..(7): 5-methyl modified nucleotide
  modified_base (8)..(8): 5-methyl modified nucleotide
  modified_base (10)..(10): 5-methyl modified nucleotide
  modified_base (16)..(16): 5-methyl modified nucleotide
  modified_base (18)..(18): 5-methyl modified nucleotide
  modified_base (19)..(19): 5-methyl bicyclic nucleic acid
  modified_base (20)..(20): 5-methyl bicyclic nucleic acid
  source: /note="3' tri-ethylene glycol (TEG)"
ugauauccucaaggucaccc

SEQ ID NO: 20201 - DNA, 22 bp, Artificial Sequence
  source: /note="Description of Artificial Sequence: Synthetic oligonucleotide"
  source: /note="Description of Combined DNA/RNA Molecule: Synthetic oligonucleotide"
  source: /note="DNA/RNA"
  modified_base (1)..(1): 5-methyl modified nucleotide
  modified_base (4)..(4): 5-methyl modified nucleotide
  modified_base (13)..(13): 5-methyl modified nucleotide
  modified_base (16)..(16): 5-methyl modified nucleotide
  modified_base (18)..(18): 5-methyl modified nucleotide
  modified_base (21)..(21): bicyclic nucleic acid (BNA)
  modified_base (22)..(22): bicyclic nucleic acid (BNA)
  source: /note="3' tri-ethylene glycol (TEG)"
cugcuugaugaucaucucgutg

SEQ ID NO: 20202 - DNA, 18 bp, Artificial Sequence
  source: /note="Description of Artificial Sequence: Synthetic oligonucleotide"
  source: /note="Description of Combined DNA/RNA Molecule: Synthetic oligonucleotide"
  source: /note="DNA/RNA"
  modified_base (1)..(1): 5-methyl modified nucleotide
  modified_base (4)..(4): 5-methyl modified nucleotide
  modified_base (13)..(13): 5-methyl modified nucleotide
  modified_base (16)..(16): 5-methyl modified nucleotide
  modified_base (17)..(17): bicyclic nucleic acid (BNA)
  modified_base (18)..(18): 5-methyl bicyclic nucleic acid
  source: /note="3' tri-ethylene glycol (TEG)"
cugcuugaugaucauctc

SEQ ID NO: 20203 - RNA, 19 nt, Artificial Sequence
  source: /note="Description of Artificial Sequence: Synthetic oligonucleotide"
  source: /note="RNA"
  modified_base (5)..(5): 5-methyl modified nucleotide
  modified_base (6)..(6): 5-methyl modified nucleotide
  modified_base (14)..(14): 5-methyl modified nucleotide
  modified_base (15)..(15): 5-methyl modified nucleotide
  modified_base (17)..(17): 5-methyl modified nucleotide
  modified_base (18)..(18): bicyclic nucleic acid (BNA)
  modified_base (19)..(19): bicyclic nucleic acid (BNA)
  source: /note="3' tri-ethylene glycol (TEG)"
guuuccuuaguaaccacag

SEQ ID NO: 20204 - RNA, 17 nt, Artificial Sequence
  source: /note="Description of Artificial Sequence: Synthetic oligonucleotide"
  source: /note="RNA"
  modified_base (5)..(5): 5-methyl modified nucleotide
  modified_base (6)..(6): 5-methyl modified nucleotide
  modified_base (14)..(14): 5-methyl modified nucleotide
  modified_base (15)..(15): 5-methyl modified nucleotide
  modified_base (16)..(16): bicyclic nucleic acid (BNA)
  modified_base (17)..(17): 5-methyl bicyclic nucleic acid
  source: /note="3' tri-ethylene glycol (TEG)"
guuuccuuaguaaccac

SEQ ID NO: 20205 - DNA, 20 bp, Artificial Sequence
  source: /note="Description of Artificial Sequence: Synthetic oligonucleotide"
  source: /note="Description of Combined DNA/RNA Molecule: Synthetic oligonucleotide"
  source: /note="DNA/RNA"
  source: /note="5' tri-ethylene glycol (TEG)"
  modified_base (2)..(2): 5-methyl modified nucleotide
  modified_base (14)..(14): 5-methyl modified nucleotide
  modified_base (19)..(19): 5-methyl bicyclic nucleic acid
  modified_base (20)..(20): bicyclic nucleic acid (BNA)
  source: /note="3' tri-ethylene glycol (TEG)"
ucaaggaagauggcauuuct

SEQ ID NO: 20206 - RNA, 22 nt, Artificial Sequence
  source: /note="Description of Artificial Sequence: Synthetic oligonucleotide"
  source: /note="RNA"
  source: /note="5' tri-ethylene glycol (TEG)"
  modified_base (2)..(2): 5-methyl modified nucleotide
  modified_base (14)..(14): 5-methyl modified nucleotide
  modified_base (19)..(19): 5-methyl modified nucleotide
  modified_base (21)..(21): bicyclic nucleic acid (BNA)
  modified_base (22)..(22): bicyclic nucleic acid (BNA)
  source: /note="3' tri-ethylene glycol (TEG)"
ucaaggaagauggcauuucuag

SEQ ID NO: 20207 - RNA, 18 nt, Artificial Sequence
  source: /note="Description of Artificial Sequence: Synthetic oligonucleotide"
  source: /note="RNA"
  source: /note="5' tri-ethylene glycol (TEG)"
  modified_base (9)..(9): 5-methyl modified nucleotide
  modified_base (13)..(13): 5-methyl modified nucleotide
  modified_base (14)..(14): 5-methyl modified nucleotide
  modified_base (17)..(17): bicyclic nucleic acid (BNA)
  modified_base (18)..(18): 5-methyl bicyclic nucleic acid
  source: /note="3' tri-ethylene glycol (TEG)"
gguaaguucuguccaagc

SEQ ID NO: 20208 - RNA, 18 nt, Artificial Sequence
  source: /note="Description of Artificial Sequence: Synthetic oligonucleotide"
  source: /note="RNA"
  source: /note="5' tri-ethylene glycol (TEG)"
  modified_base (8)..(8): 5-methyl modified nucleotide
  modified_base (12)..(12): 5-methyl modified nucleotide
  modified_base (13)..(13): 5-methyl modified nucleotide
  modified_base (17)..(17): 5-methyl bicyclic nucleic acid
  modified_base (18)..(18): 5-methyl bicyclic nucleic acid
  source: /note="3' tri-ethylene glycol (TEG)"
guaaguucuguccaagcc

SEQ ID NO: 20209 - RNA, 18 nt, Artificial Sequence
  source: /note="Description of Artificial Sequence: Synthetic oligonucleotide"
  source: /note="RNA"
  source: /note="5' tri-ethylene glycol (TEG)"
  modified_base (4)..(4): 5-methyl modified nucleotide
  modified_base (13)..(13): 5-methyl modified nucleotide
  modified_base (17)..(17): 5-methyl bicyclic nucleic acid
  modified_base (18)..(18): 5-methyl bicyclic nucleic acid
  source: /note="3' tri-ethylene glycol (TEG)"
agucgguaaguucugucc

SEQ ID NO: 20210 - RNA, 18 nt, Artificial Sequence
  source: /note="Description of Artificial Sequence: Synthetic oligonucleotide"
  source: /note="RNA"
  source: /note="5' tri-ethylene glycol (TEG)"
  modified_base (1)..(1): 5-methyl modified nucleotide
  modified_base (5)..(5): 5-methyl modified nucleotide
  modified_base (6)..(6): 5-methyl modified nucleotide
  modified_base (10)..(10): 5-methyl modified nucleotide
  modified_base (11)..(11): 5-methyl modified nucleotide
  modified_base (12)..(12): 5-methyl modified nucleotide
  modified_base (17)..(17): bicyclic nucleic acid (BNA)
  modified_base (18)..(18): bicyclic nucleic acid (BNA)
  source: /note="3' tri-ethylene glycol (TEG)"
cuguccaagcccgguuga

SEQ ID NO: 20211 - RNA, 15 nt, Artificial Sequence
  source: /note="Description of Artificial Sequence: Synthetic oligonucleotide"
  source: /note="RNA"
  source: /note="5' tri-ethylene glycol (TEG)"
  modified_base (7)..(7): 5-methyl modified nucleotide
  modified_base (11)..(11): 5-methyl modified nucleotide
  modified_base (12)..(12): 5-methyl modified nucleotide
  modified_base (14)..(14): bicyclic nucleic acid (BNA)
  modified_base (15)..(15): bicyclic nucleic acid (BNA)
  source: /note="3' tri-ethylene glycol (TEG)"
uaaguucuguccaag

SEQ ID NO: 20212 - RNA, 20 nt, Artificial Sequence
  source: /note="Description of Artificial Sequence: Synthetic oligonucleotide"
  source: /note="RNA"
  source: /note="5' tri-ethylene glycol (TEG)"
  modified_base (3)..(3): 5-methyl modified nucleotide
  modified_base (7)..(7): 5-methyl modified nucleotide
  modified_base (8)..(8): 5-methyl modified nucleotide
  modified_base (12)..(12): 5-methyl modified nucleotide
  modified_base (13)..(13): 5-methyl modified nucleotide
  modified_base (14)..(14): 5-methyl modified nucleotide
  modified_base (19)..(19): bicyclic nucleic acid (BNA)
  modified_base (20)..(20): bicyclic nucleic acid (BNA)
  source: /note="3' tri-ethylene glycol (TEG)"
uucuguccaagcccgguuga

SEQ ID NO: 20213 - DNA, 19 bp, Artificial Sequence
  source: /note="Description of Artificial Sequence: Synthetic oligonucleotide"
  source: /note="Description of Combined DNA/RNA Molecule: Synthetic oligonucleotide"
  source: /note="DNA/RNA"
  source: /note="5' tri-ethylene glycol (TEG)"
  modified_base (3)..(3): 5-methyl modified nucleotide
  modified_base (7)..(7): 5-methyl modified nucleotide
  modified_base (8)..(8): 5-methyl modified nucleotide
  modified_base (12)..(12): 5-methyl modified nucleotide
  modified_base (13)..(13): 5-methyl modified nucleotide
  modified_base (14)..(14): 5-methyl modified nucleotide
  modified_base (18)..(18): bicyclic nucleic acid (BNA)
  modified_base (19)..(19): bicyclic nucleic acid (BNA)
  source: /note="3' tri-ethylene glycol (TEG)"
uucuguccaagcccggutg

SEQ ID NO: 20214 - DNA, 18 bp, Artificial Sequence
  source: /note="Description of Artificial Sequence: Synthetic oligonucleotide"
  source: /note="Description of Combined DNA/RNA Molecule: Synthetic oligonucleotide"
  source: /note="DNA/RNA"
  source: /note="5' tri-ethylene glycol (TEG)"
  modified_base (3)..(3): 5-methyl modified nucleotide
  modified_base (7)..(7): 5-methyl modified nucleotide
  modified_base (8)..(8): 5-methyl modified nucleotide
  modified_base (12)..(12): 5-methyl modified nucleotide
  modified_base (13)..(13): 5-methyl modified nucleotide
  modified_base (14)..(14): 5-methyl modified nucleotide
  modified_base (17)..(17): bicyclic nucleic acid (BNA)
  modified_base (18)..(18): bicyclic nucleic acid (BNA)
  source: /note="3' tri-ethylene glycol (TEG)"
uucuguccaagcccggtt

SEQ ID NO: 20215 - DNA, 17 bp, Artificial Sequence
  source: /note="Description of Artificial Sequence: Synthetic oligonucleotide"
  source: /note="Description of Combined DNA/RNA Molecule: Synthetic oligonucleotide"
  source: /note="DNA/RNA"
  source: /note="5' tri-ethylene glycol (TEG)"
  modified_base (3)..(3): 5-methyl modified nucleotide
  modified_base (7)..(7): 5-methyl modified nucleotide
  modified_base (8)..(8): 5-methyl modified nucleotide
  modified_base (12)..(12): 5-methyl modified nucleotide
  modified_base (13)..(13): 5-methyl modified nucleotide
  modified_base (14)..(14): 5-methyl modified nucleotide
  modified_base (16)..(16): bicyclic nucleic acid (BNA)
  modified_base (17)..(17): bicyclic nucleic acid (BNA)
  source: /note="3' tri-ethylene glycol (TEG)"
uucuguccaagcccggt

SEQ ID NO: 20216 - RNA, 16 nt, Artificial Sequence
  source: /note="Description of Artificial Sequence: Synthetic oligonucleotide"
  source: /note="RNA"
  source: /note="5' tri-ethylene glycol (TEG)"
  modified_base (3)..(3): 5-methyl modified nucleotide
  modified_base (7)..(7): 5-methyl modified nucleotide
  modified_base (8)..(8): 5-methyl modified nucleotide
  modified_base (12)..(12): 5-methyl modified nucleotide
  modified_base (13)..(13): 5-methyl modified nucleotide
  modified_base (14)..(14): 5-methyl modified nucleotide
  modified_base (15)..(15): bicyclic nucleic acid (BNA)
  modified_base (16)..(16): bicyclic nucleic acid (BNA)
  source: /note="3' tri-ethylene glycol (TEG)"
uucuguccaagcccgg

SEQ ID NO: 20217 - RNA, 15 nt, Artificial Sequence
  source: /note="Description of Artificial Sequence: Synthetic oligonucleotide"
  source: /note="RNA"
  source: /note="5' tri-ethylene glycol (TEG)"
  modified_base (3)..(3): 5-methyl modified nucleotide
  modified_base (7)..(7): 5-methyl modified nucleotide
  modified_base (8)..(8): 5-methyl modified nucleotide
  modified_base (12)..(12): 5-methyl modified nucleotide
  modified_base (13)..(13): 5-methyl modified nucleotide
  modified_base (14)..(14): 5-methyl bicyclic nucleic acid
  modified_base (15)..(15): bicyclic nucleic acid (BNA)
  source: /note="3' tri-ethylene glycol (TEG)"
uucuguccaagcccg

SEQ ID NO: 20218 - RNA, 14 nt, Artificial Sequence
  source: /note="Description of Artificial Sequence: Synthetic oligonucleotide"
  source: /note="RNA"
  source: /note="5' tri-ethylene glycol (TEG)"
  modified_base (3)..(3): 5-methyl modified nucleotide
  modified_base (7)..(7): 5-methyl modified nucleotide
  modified_base (8)..(8): 5-methyl modified nucleotide
  modified_base (12)..(12): 5-methyl modified nucleotide
  modified_base (13)..(13): 5-methyl bicyclic nucleic acid
  modified_base (14)..(14): 5-methyl bicyclic nucleic acid
  source: /note="3' tri-ethylene glycol (TEG)"
uucuguccaagccc

SEQ ID NO: 20219 - RNA, 13 nt, Artificial Sequence
  source: /note="Description of Artificial Sequence: Synthetic oligonucleotide"
  source: /note="RNA"
  source: /note="5' tri-ethylene glycol (TEG)"
  modified_base (3)..(3): 5-methyl modified nucleotide
  modified_base (7)..(7): 5-methyl modified nucleotide
  modified_base (8)..(8): 5-methyl modified nucleotide
  modified_base (12)..(12): 5-methyl bicyclic nucleic acid
  modified_base (13)..(13): 5-methyl bicyclic nucleic acid
  source: /note="3' tri-ethylene glycol (TEG)"
uucuguccaagcc

SEQ ID NO: 20220 - RNA, 12 nt, Artificial Sequence
  source: /note="Description of Artificial Sequence: Synthetic oligonucleotide"
  source: /note="RNA"
  source: /note="5' tri-ethylene glycol (TEG)"
  modified_base (3)..(3): 5-methyl modified nucleotide
  modified_base (7)..(7): 5-methyl modified nucleotide
  modified_base (8)..(8): 5-methyl modified nucleotide
  modified_base (11)..(11): bicyclic nucleic acid (BNA)
  modified_base (12)..(12): 5-methyl bicyclic nucleic acid
  source: /note="3' tri-ethylene glycol (TEG)"
uucuguccaagc

SEQ ID NO: 20221 - RNA, 11 nt, Artificial Sequence
  source: /note="Description of Artificial Sequence: Synthetic oligonucleotide"
  source: /note="RNA"
  source: /note="5' tri-ethylene glycol (TEG)"
  modified_base (3)..(3): 5-methyl modified nucleotide
  modified_base (7)..(7): 5-methyl modified nucleotide
  modified_base (8)..(8): 5-methyl modified nucleotide
  modified_base (10)..(10): bicyclic nucleic acid (BNA)
  modified_base (11)..(11): bicyclic nucleic acid (BNA)
  source: /note="3' tri-ethylene glycol (TEG)"
uucuguccaag

SEQ ID NO: 20222 - RNA, 10 nt, Artificial Sequence
  source: /note="Description of Artificial Sequence: Synthetic oligonucleotide"
  source: /note="RNA"
  source: /note="5' tri-ethylene glycol (TEG)"
  modified_base (3)..(3): 5-methyl modified nucleotide
  modified_base (7)..(7): 5-methyl modified nucleotide
  modified_base (8)..(8): 5-methyl modified nucleotide
  modified_base (9)..(9): bicyclic nucleic acid (BNA)
  modified_base (10)..(10): bicyclic nucleic acid (BNA)
  source: /note="3' tri-ethylene glycol (TEG)"
uucuguccaa

SEQ ID NO: 20223 - RNA, 9 nt, Artificial Sequence
  source: /note="Description of Artificial Sequence: Synthetic oligonucleotide"
  source: /note="RNA"
  source: /note="5' tri-ethylene glycol (TEG)"
  modified_base (3)..(3): 5-methyl modified nucleotide
  modified_base (7)..(7): 5-methyl modified nucleotide
  modified_base (8)..(8): 5-methyl bicyclic nucleic acid
  modified_base (9)..(9): bicyclic nucleic acid (BNA)
  source: /note="3' tri-ethylene glycol (TEG)"
uucugucca

SEQ ID NO: 20224 - RNA, 8 nt, Artificial Sequence
  source: /note="Description of Artificial Sequence: Synthetic oligonucleotide"
  source: /note="RNA"
  source: /note="5' tri-ethylene glycol (TEG)"
  modified_base (3)..(3): 5-methyl modified nucleotide
  modified_base (7)..(7): 5-methyl bicyclic nucleic acid
  modified_base (8)..(8): 5-methyl bicyclic nucleic acid
  source: /note="3' tri-ethylene glycol (TEG)"
uucugucc

SEQ ID NO: 20225 - RNA, 19 nt, Artificial Sequence
  source: /note="Description of Artificial Sequence: Synthetic oligonucleotide"
  source: /note="RNA"
  source: /note="5' tri-ethylene glycol (TEG)"
  modified_base (2)..(2): 5-methyl modified nucleotide
  modified_base (6)..(6): 5-methyl modified nucleotide
  modified_base (7)..(7): 5-methyl modified nucleotide
  modified_base (11)..(11): 5-methyl modified nucleotide
  modified_base (12)..(12): 5-methyl modified nucleotide
  modified_base (13)..(13): 5-methyl modified nucleotide
  modified_base (18)..(18): bicyclic nucleic acid (BNA)
  modified_base (19)..(19): bicyclic nucleic acid (BNA)
  source: /note="3' tri-ethylene glycol (TEG)"
ucuguccaagcccgguuga

SEQ ID NO: 20226 - DNA, 18 bp, Artificial Sequence
  source: /note="Description of Artificial Sequence: Synthetic oligonucleotide"
  source: /note="Description of Combined DNA/RNA Molecule: Synthetic oligonucleotide"
  source: /note="DNA/RNA"
  source: /note="5' tri-ethylene glycol (TEG)"
  modified_base (2)..(2): 5-methyl modified nucleotide
  modified_base (6)..(6): 5-methyl modified nucleotide
  modified_base (7)..(7): 5-methyl modified nucleotide
  modified_base (11)..(11): 5-methyl modified nucleotide
  modified_base (12)..(12): 5-methyl modified nucleotide
  modified_base (13)..(13): 5-methyl modified nucleotide
  modified_base (17)..(17): bicyclic nucleic acid (BNA)
  modified_base (18)..(18): bicyclic nucleic acid (BNA)
  source: /note="3' tri-ethylene glycol (TEG)"
ucuguccaagcccggutg

SEQ ID NO: 20227 - DNA, 17 bp, Artificial Sequence
  source: /note="Description of Artificial Sequence: Synthetic oligonucleotide"
  source: /note="Description of Combined DNA/RNA Molecule: Synthetic oligonucleotide"
  source: /note="DNA/RNA"
  source: /note="5' tri-ethylene glycol (TEG)"
  modified_base (2)..(2): 5-methyl modified nucleotide
  modified_base (6)..(6): 5-methyl modified nucleotide
  modified_base (7)..(7): 5-methyl modified nucleotide
  modified_base (11)..(11): 5-methyl modified nucleotide
  modified_base (12)..(12): 5-methyl modified nucleotide
  modified_base (13)..(13): 5-methyl modified nucleotide
  modified_base (16)..(16): bicyclic nucleic acid (BNA)
  modified_base (17)..(17): bicyclic nucleic acid (BNA)
  source: /note="3' tri-ethylene glycol (TEG)"
ucuguccaagcccggtt

SEQ ID NO: 20228 - DNA, 16 bp, Artificial Sequence
  source: /note="Description of Artificial Sequence: Synthetic oligonucleotide"
  source: /note="Description of Combined DNA/RNA Molecule: Synthetic oligonucleotide"
  source: /note="DNA/RNA"
  source: /note="5' tri-ethylene glycol (TEG)"
  modified_base (2)..(2): 5-methyl modified nucleotide
  modified_base (6)..(6): 5-methyl modified nucleotide
  modified_base (7)..(7): 5-methyl modified nucleotide
  modified_base (11)..(11): 5-methyl modified nucleotide
  modified_base (12)..(12): 5-methyl modified nucleotide
  modified_base (13)..(13): 5-methyl modified nucleotide
  modified_base (15)..(15): bicyclic nucleic acid (BNA)
  modified_base (16)..(16): bicyclic nucleic acid (BNA)
  source: /note="3' tri-ethylene glycol (TEG)"
ucuguccaagcccggt

SEQ ID NO: 20229 - RNA, 15 nt, Artificial Sequence
  source: /note="Description of Artificial Sequence: Synthetic oligonucleotide"
  source: /note="RNA"
  source: /note="5' tri-ethylene glycol (TEG)"
  modified_base (2)..(2): 5-methyl modified nucleotide
  modified_base (6)..(6): 5-methyl modified nucleotide
  modified_base (7)..(7): 5-methyl modified nucleotide
  modified_base (11)..(11): 5-methyl modified nucleotide
  modified_base (12)..(12): 5-methyl modified nucleotide
  modified_base (13)..(13): 5-methyl modified nucleotide
  modified_base (14)..(14): bicyclic nucleic acid (BNA)
  modified_base (15)..(15): bicyclic nucleic acid (BNA)
  source: /note="3' tri-ethylene glycol (TEG)"
ucuguccaagcccgg

SEQ ID NO: 20230 - RNA, 14 nt, Artificial Sequence
  source: /note="Description of Artificial Sequence: Synthetic oligonucleotide"
  source: /note="RNA"
  source: /note="5' tri-ethylene glycol (TEG)"
  modified_base (2)..(2): 5-methyl modified nucleotide
  modified_base (6)..(6): 5-methyl modified nucleotide
  modified_base (7)..(7): 5-methyl modified nucleotide
  modified_base (11)..(11): 5-methyl modified nucleotide
  modified_base (12)..(12): 5-methyl modified nucleotide
  modified_base (13)..(13): 5-methyl bicyclic nucleic acid
  modified_base (14)..(14): bicyclic nucleic acid (BNA)
  source: /note="3' tri-ethylene glycol (TEG)"
ucuguccaagcccg

SEQ ID NO: 20231 - RNA, 13 nt, Artificial Sequence
  source: /note="Description of Artificial Sequence: Synthetic oligonucleotide"
  source: /note="RNA"
  source: /note="5' tri-ethylene glycol (TEG)"
  modified_base (2)..(2): 5-methyl modified nucleotide
  modified_base (6)..(6): 5-methyl modified nucleotide
  modified_base (7)..(7): 5-methyl modified nucleotide
  modified_base (11)..(11): 5-methyl modified nucleotide
  modified_base (12)..(12): 5-methyl bicyclic nucleic acid
  modified_base (13)..(13): 5-methyl bicyclic nucleic acid
  source: /note="3' tri-ethylene glycol (TEG)"
ucuguccaagccc

SEQ ID NO: 20232 - RNA, 12 nt, Artificial Sequence
  source: /note="Description of Artificial Sequence: Synthetic oligonucleotide"
  source: /note="RNA"
  source: /note="5' tri-ethylene glycol (TEG)"
  modified_base (2)..(2): 5-methyl modified nucleotide
  modified_base (6)..(6): 5-methyl modified nucleotide
  modified_base (7)..(7): 5-methyl modified nucleotide
  modified_base (11)..(11): 5-methyl bicyclic nucleic acid
  modified_base (12)..(12): 5-methyl bicyclic nucleic acid
  source: /note="3' tri-ethylene glycol (TEG)"
ucuguccaagcc

SEQ ID NO: 20233 - RNA, 11 nt, Artificial Sequence
  source: /note="Description of Artificial Sequence: Synthetic oligonucleotide"
  source: /note="RNA"
  source: /note="5' tri-ethylene glycol (TEG)"
  modified_base (2)..(2): 5-methyl modified nucleotide
  modified_base (6)..(6): 5-methyl modified nucleotide
  modified_base (7)..(7): 5-methyl modified nucleotide
  modified_base (10)..(10): bicyclic nucleic acid (BNA)
  modified_base (11)..(11): 5-methyl bicyclic nucleic acid
  source: /note="3' tri-ethylene glycol (TEG)"
ucuguccaagc

SEQ ID NO: 20234 - RNA, 10 nt, Artificial Sequence
  source: /note="Description of Artificial Sequence: Synthetic oligonucleotide"
  source: /note="RNA"
  source: /note="5' tri-ethylene glycol (TEG)"
  modified_base (2)..(2): 5-methyl modified nucleotide
  modified_base (6)..(6): 5-methyl modified nucleotide
  modified_base (7)..(7): 5-methyl modified nucleotide
  modified_base (9)..(9): bicyclic nucleic acid (BNA)
  modified_base (10)..(10): bicyclic nucleic acid (BNA)
  source: /note="3' tri-ethylene glycol (TEG)"
ucuguccaag

SEQ ID NO: 20235 - RNA, 9 nt, Artificial Sequence
  source: /note="Description of Artificial Sequence: Synthetic oligonucleotide"
  source: /note="RNA"
  source: /note="5' tri-ethylene glycol (TEG)"
  modified_base (2)..(2): 5-methyl modified nucleotide
  modified_base (6)..(6): 5-methyl modified nucleotide
  modified_base (7)..(7): 5-methyl modified nucleotide
  modified_base (8)..(8): bicyclic nucleic acid (BNA)
  modified_base (9)..(9): bicyclic nucleic acid (BNA)
  source: /note="3' tri-ethylene glycol (TEG)"
ucuguccaa

SEQ ID NO: 20236 - RNA, 8 nt, Artificial Sequence
  source: /note="Description of Artificial Sequence: Synthetic oligonucleotide"
  source: /note="RNA"
  source: /note="5' tri-ethylene glycol (TEG)"
  modified_base (2)..(2): 5-methyl modified nucleotide
  modified_base (6)..(6): 5-methyl modified nucleotide
  modified_base (7)..(7): 5-methyl bicyclic nucleic acid
  modified_base (8)..(8): bicyclic nucleic acid (BNA)
  source: /note="3' tri-ethylene glycol (TEG)"
ucugucca

SEQ ID NO: 20237 - DNA, 17 bp, Artificial Sequence
  source: /note="Description of Artificial Sequence: Synthetic oligonucleotide"
  source: /note="Description of Combined DNA/RNA Molecule: Synthetic oligonucleotide"
  source: /note="DNA/RNA"
  source: /note="5' tri-ethylene glycol (TEG)"
  modified_base (1)..(1): 5-methyl modified nucleotide
  modified_base (5)..(5): 5-methyl modified nucleotide
  modified_base (6)..(6): 5-methyl modified nucleotide
  modified_base (10)..(10): 5-methyl modified nucleotide
  modified_base (11)..(11): 5-methyl modified nucleotide
  modified_base (12)..(12): 5-methyl modified nucleotide
  modified_base (16)..(16): bicyclic nucleic acid (BNA)
  modified_base (17)..(17): bicyclic nucleic acid (BNA)
  source: /note="3' tri-ethylene glycol (TEG)"
cuguccaagcccggutg

SEQ ID NO: 20238 - DNA, 16 bp, Artificial Sequence
  source: /note="Description of Artificial Sequence: Synthetic oligonucleotide"
  source: /note="Description of Combined DNA/RNA Molecule: Synthetic oligonucleotide"
  source: /note="DNA/RNA"
  source: /note="5' tri-ethylene glycol (TEG)"
  modified_base (1)..(1): 5-methyl modified nucleotide
  modified_base (5)..(5): 5-methyl modified nucleotide
  modified_base (6)..(6): 5-methyl modified nucleotide
  modified_base (10)..(10): 5-methyl modified nucleotide
  modified_base (11)..(11): 5-methyl modified nucleotide
  modified_base (12)..(12): 5-methyl modified nucleotide
  modified_base (15)..(15): bicyclic nucleic acid (BNA)
  modified_base (16)..(16): bicyclic nucleic acid (BNA)
  source: /note="3' tri-ethylene glycol (TEG)"
cuguccaagcccggtt

SEQ ID NO: 20239 - DNA, 15 bp, Artificial Sequence
  source: /note="Description of Artificial Sequence: Synthetic oligonucleotide"
  source: /note="Description of Combined DNA/RNA Molecule: Synthetic oligonucleotide"
  source: /note="DNA/RNA"
  source: /note="5' tri-ethylene glycol (TEG)"
  modified_base (1)..(1): 5-methyl modified nucleotide
  modified_base (5)..(5): 5-methyl modified nucleotide
  modified_base (6)..(6): 5-methyl modified nucleotide
  modified_base (10)..(10): 5-methyl modified nucleotide
  modified_base (11)..(11): 5-methyl modified nucleotide
  modified_base (12)..(12): 5-methyl modified nucleotide
  modified_base (14)..(14): bicyclic nucleic acid (BNA)
  modified_base (15)..(15): bicyclic nucleic acid (BNA)
  source: /note="3' tri-ethylene glycol (TEG)"
cuguccaagcccggt

SEQ ID NO: 20240 - RNA, 14 nt, Artificial Sequence
  source: /note="Description of Artificial Sequence: Synthetic oligonucleotide"
  source: /note="RNA"
  source: /note="5' tri-ethylene glycol (TEG)"
  modified_base (1)..(1): 5-methyl modified nucleotide
  modified_base (5)..(5): 5-methyl modified nucleotide
  modified_base (6)..(6): 5-methyl modified nucleotide
  modified_base (10)..(10): 5-methyl modified nucleotide
  modified_base (11)..(11): 5-methyl modified nucleotide
  modified_base (12)..(12): 5-methyl modified nucleotide
  modified_base (13)..(13): bicyclic nucleic acid (BNA)
  modified_base (14)..(14): bicyclic nucleic acid (BNA)
  source: /note="3' tri-ethylene glycol (TEG)"
cuguccaagcccgg

SEQ ID NO: 20241 - RNA, 13 nt, Artificial Sequence
  source: /note="Description of Artificial Sequence: Synthetic oligonucleotide"
  source: /note="RNA"
  source: /note="5' tri-ethylene glycol (TEG)"
  modified_base (1)..(1): 5-methyl modified nucleotide
  modified_base (5)..(5): 5-methyl modified nucleotide
  modified_base (6)..(6): 5-methyl modified nucleotide
  modified_base (10)..(10): 5-methyl modified nucleotide
  modified_base (11)..(11): 5-methyl modified nucleotide
  modified_base (12)..(12): 5-methyl bicyclic nucleic acid
  modified_base (13)..(13): bicyclic nucleic acid (BNA)
  source: /note="3' tri-ethylene glycol (TEG)"
cuguccaagcccg

SEQ ID NO: 20242 - RNA, 12 nt, Artificial Sequence
  source: /note="Description of Artificial Sequence: Synthetic oligonucleotide"
  source: /note="RNA"
  source: /note="5' tri-ethylene glycol (TEG)"
  modified_base (1)..(1): 5-methyl modified nucleotide
  modified_base (5)..(5): 5-methyl modified nucleotide
  modified_base (6)..(6): 5-methyl modified nucleotide
  modified_base (10)..(10): 5-methyl modified nucleotide
  modified_base (11)..(11): 5-methyl bicyclic nucleic acid
  modified_base (12)..(12): 5-methyl bicyclic nucleic acid
  source: /note="3' tri-ethylene glycol (TEG)"
cuguccaagccc

SEQ ID NO: 20243 - RNA, 11 nt, Artificial Sequence
  source: /note="Description of Artificial Sequence: Synthetic oligonucleotide"
  source: /note="RNA"
  source: /note="5' tri-ethylene glycol (TEG)"
  modified_base (1)..(1): 5-methyl modified nucleotide
  modified_base (5)..(5): 5-methyl modified nucleotide
  modified_base (6)..(6): 5-methyl modified nucleotide
  modified_base (10)..(10): 5-methyl bicyclic nucleic acid
  modified_base (11)..(11): 5-methyl bicyclic nucleic acid
  source: /note="3' tri-ethylene glycol (TEG)"
cuguccaagcc

SEQ ID NO: 20244 - RNA, 10 nt, Artificial Sequence
  source: /note="Description of Artificial Sequence: Synthetic oligonucleotide"
  source: /note="RNA"
  source: /note="5' tri-ethylene glycol (TEG)"
  modified_base (1)..(1): 5-methyl modified nucleotide
  modified_base (5)..(5): 5-methyl modified nucleotide
  modified_base (6)..(6): 5-methyl modified nucleotide
  modified_base (9)..(9): bicyclic nucleic acid (BNA)
  modified_base (10)..(10): 5-methyl bicyclic nucleic acid
  source: /note="3' tri-ethylene glycol (TEG)"
cuguccaagc

SEQ ID NO: 20245 - RNA, 9 nt, Artificial Sequence
  source: /note="Description of Artificial Sequence: Synthetic oligonucleotide"
  source: /note="RNA"
  source: /note="5' tri-ethylene glycol (TEG)"
  modified_base (1)..(1): 5-methyl modified nucleotide
  modified_base (5)..(5): 5-methyl modified nucleotide
  modified_base (6)..(6): 5-methyl modified nucleotide
  modified_base (8)..(8): bicyclic nucleic acid (BNA)
  modified_base (9)..(9): bicyclic nucleic acid (BNA)
  source: /note="3' tri-ethylene glycol (TEG)"
cuguccaag

SEQ ID NO: 20246 - RNA, 8 nt, Artificial Sequence
  source: /note="Description of Artificial Sequence: Synthetic oligonucleotide"
  source: /note="RNA"
  source: /note="5' tri-ethylene glycol (TEG)"
  modified_base (1)..(1): 5-methyl modified nucleotide
  modified_base (5)..(5): 5-methyl modified nucleotide
  modified_base (6)..(6): 5-methyl modified nucleotide
  modified_base (7)..(7): bicyclic nucleic acid (BNA)
  modified_base (8)..(8): bicyclic nucleic acid (BNA)
  source: /note="3' tri-ethylene glycol (TEG)"
cuguccaa

SEQ ID NO: 20247 - DNA, 20 bp, Artificial Sequence
  source: /note="Description of Artificial Sequence: Synthetic oligonucleotide"
  source: /note="Description of Combined DNA/RNA Molecule: Synthetic oligonucleotide"
  source: /note="DNA/RNA"
  source: /note="5' tri-ethylene glycol (TEG)"
  modified_base (4)..(4): 5-methyl modified nucleotide
  modified_base (8)..(8): 5-methyl modified nucleotide
  modified_base (9)..(9): 5-methyl modified nucleotide
  modified_base (13)..(13): 5-methyl modified nucleotide
  modified_base (14)..(14): 5-methyl modified nucleotide
  modified_base (15)..(15): 5-methyl modified nucleotide
  modified_base (19)..(19): bicyclic nucleic acid (BNA)
  modified_base (20)..(20): bicyclic nucleic acid (BNA)
  source: /note="3' tri-ethylene glycol (TEG)"
guucuguccaagcccggutg

SEQ ID NO: 20248 - DNA, 19 bp, Artificial Sequence
  source: /note="Description of Artificial Sequence: Synthetic oligonucleotide"
  source: /note="Description of Combined DNA/RNA Molecule: Synthetic oligonucleotide"
  source: /note="DNA/RNA"
  source: /note="5' tri-ethylene glycol (TEG)"
  modified_base (4)..(4): 5-methyl modified nucleotide
  modified_base (8)..(8): 5-methyl modified nucleotide
  modified_base (9)..(9): 5-methyl modified nucleotide
  modified_base (13)..(13): 5-methyl modified nucleotide
  modified_base (14)..(14): 5-methyl modified nucleotide
  modified_base (15)..(15): 5-methyl modified nucleotide
  modified_base (18)..(18): bicyclic nucleic acid (BNA)
  modified_base (19)..(19): bicyclic nucleic acid (BNA)
  source: /note="3' tri-ethylene glycol (TEG)"
guucuguccaagcccggtt

SEQ ID NO: 20249 - DNA, 18 bp, Artificial Sequence
  source: /note="Description of Artificial Sequence: Synthetic oligonucleotide"
  source: /note="Description of Combined DNA/RNA Molecule: Synthetic oligonucleotide"
  source: /note="DNA/RNA"
  source: /note="5' tri-ethylene glycol (TEG)"
  modified_base (4)..(4): 5-methyl modified nucleotide
  modified_base (8)..(8): 5-methyl modified nucleotide
  modified_base (9)..(9): 5-methyl modified nucleotide
  modified_base (13)..(13): 5-methyl modified nucleotide
  modified_base (14)..(14): 5-methyl modified nucleotide
  modified_base (15)..(15): 5-methyl modified nucleotide
  modified_base (17)..(17): bicyclic nucleic acid (BNA)
  modified_base (18)..(18): bicyclic nucleic acid (BNA)
  source: /note="3' tri-ethylene glycol (TEG)"
guucuguccaagcccggt

SEQ ID NO: 20250 - RNA, 17 nt, Artificial Sequence
  source: /note="Description of Artificial Sequence: Synthetic oligonucleotide"
  source: /note="RNA"
  source: /note="5' tri-ethylene glycol (TEG)"
  modified_base (4)..(4): 5-methyl modified nucleotide
  modified_base (8)..(8): 5-methyl modified nucleotide
  modified_base (9)..(9): 5-methyl modified nucleotide
  modified_base (13)..(13): 5-methyl modified nucleotide
  modified_base (14)..(14): 5-methyl modified nucleotide
  modified_base (15)..(15): 5-methyl modified nucleotide
  modified_base (16)..(16): bicyclic nucleic acid (BNA)
  modified_base (17)..(17): bicyclic nucleic acid (BNA)
  source: /note="3' tri-ethylene glycol (TEG)"
guucuguccaagcccgg

SEQ ID NO: 20251 - RNA, 16 nt, Artificial Sequence
  source: /note="Description of Artificial Sequence: Synthetic oligonucleotide"
  source: /note="RNA"
  source: /note="5' tri-ethylene glycol (TEG)"
  modified_base (4)..(4): 5-methyl modified nucleotide
  modified_base (8)..(8): 5-methyl modified nucleotide
  modified_base (9)..(9): 5-methyl modified nucleotide
  modified_base (13)..(13): 5-methyl modified nucleotide
  modified_base (14)..(14): 5-methyl modified nucleotide
  modified_base (15)..(15): 5-methyl bicyclic nucleic acid
  modified_base (16)..(16): bicyclic nucleic acid (BNA)
  source: /note="3' tri-ethylene glycol (TEG)"
guucuguccaagcccg

SEQ ID NO: 20252 - RNA, 15 nt, Artificial Sequence
  source: /note="Description of Artificial Sequence: Synthetic oligonucleotide"
  source: /note="RNA"
  source: /note="5' tri-ethylene glycol (TEG)"
  modified_base (4)..(4): 5-methyl modified nucleotide
  modified_base (8)..(8): 5-methyl modified nucleotide
  modified_base (9)..(9): 5-methyl modified nucleotide
  modified_base (13)..(13): 5-methyl modified nucleotide
  modified_base (14)..(14): 5-methyl bicyclic nucleic acid
  modified_base (15)..(15): 5-methyl bicyclic nucleic acid
  source: /note="3' tri-ethylene glycol (TEG)"
guucuguccaagccc

SEQ ID NO: 20253 - RNA, 14 nt, Artificial Sequence
  source: /note="Description of Artificial Sequence: Synthetic oligonucleotide"
  source: /note="RNA"
  source: /note="5' tri-ethylene glycol (TEG)"
  modified_base (4)..(4): 5-methyl modified nucleotide
  modified_base (8)..(8): 5-methyl modified nucleotide
  modified_base (9)..(9): 5-methyl modified nucleotide
  modified_base (13)..(13): 5-methyl bicyclic nucleic acid
  modified_base (14)..(14): 5-methyl bicyclic nucleic acid
  source: /note="3' tri-ethylene glycol (TEG)"
guucuguccaagcc

SEQ ID NO: 20254 - RNA, 13 nt, Artificial Sequence
  source: /note="Description of Artificial Sequence: Synthetic oligonucleotide"
  source: /note="RNA"
  source: /note="5' tri-ethylene glycol (TEG)"
  modified_base (4)..(4): 5-methyl modified nucleotide
  modified_base (8)..(8): 5-methyl modified nucleotide
  modified_base (9)..(9): 5-methyl modified nucleotide
  modified_base (12)..(12): bicyclic nucleic acid (BNA)
  modified_base (13)..(13): 5-methyl bicyclic nucleic acid
  source: /note="3' tri-ethylene glycol (TEG)"
guucuguccaagc

SEQ ID NO: 20255 - RNA, 12 nt, Artificial Sequence
  source: /note="Description of Artificial Sequence: Synthetic oligonucleotide"
  source: /note="RNA"
  source: /note="5' tri-ethylene glycol (TEG)"
  modified_base (4)..(4): 5-methyl modified nucleotide
  modified_base (8)..(8): 5-methyl modified nucleotide
  modified_base (9)..(9): 5-methyl modified nucleotide
  modified_base (11)..(11): bicyclic nucleic acid (BNA)
  modified_base (12)..(12): bicyclic nucleic acid (BNA)
  source: /note="3' tri-ethylene glycol (TEG)"
guucuguccaag

SEQ ID NO: 20256 - RNA, 11 nt, Artificial Sequence
  source: /note="Description of Artificial Sequence: Synthetic oligonucleotide"
  source: /note="RNA"
  source: /note="5' tri-ethylene glycol (TEG)"
  modified_base (4)..(4): 5-methyl modified nucleotide
  modified_base (8)..(8): 5-methyl modified nucleotide
  modified_base (9)..(9): 5-methyl modified nucleotide
  modified_base (10)..(10): bicyclic nucleic acid (BNA)
  modified_base (11)..(11): bicyclic nucleic acid (BNA)
  source: /note="3' tri-ethylene glycol (TEG)"
guucuguccaa

SEQ ID NO: 20257 - RNA, 10 nt, Artificial Sequence
  source: /note="Description of Artificial Sequence: Synthetic oligonucleotide"
  source: /note="RNA"
  source: /note="5' tri-ethylene glycol (TEG)"
  modified_base (4)..(4): 5-methyl modified nucleotide
  modified_base (8)..(8): 5-methyl modified nucleotide
  modified_base (9)..(9): 5-methyl bicyclic nucleic acid
  modified_base (10)..(10): bicyclic nucleic acid (BNA)
  source: /note="3' tri-ethylene glycol (TEG)"
guucugucca

SEQ ID NO: 20258 - RNA, 9 nt, Artificial Sequence
  source: /note="Description of Artificial Sequence: Synthetic oligonucleotide"
  source: /note="RNA"
  source: /note="5' tri-ethylene glycol (TEG)"
  modified_base (4)..(4): 5-methyl modified nucleotide
  modified_base (8)..(8): 5-methyl bicyclic nucleic acid
  modified_base (9)..(9): 5-methyl bicyclic nucleic acid
  source: /note="3' tri-ethylene glycol (TEG)"
guucugucc

SEQ ID NO: 20259 - DNA, 8 bp, Artificial Sequence
  source: /note="Description of Artificial Sequence: Synthetic oligonucleotide"
  source: /note="Description of Combined DNA/RNA Molecule: Synthetic oligonucleotide"
  source: /note="DNA/RNA"
  source: /note="5' tri-ethylene glycol (TEG)"
  modified_base (4)..(4): 5-methyl modified nucleotide
  modified_base (7)..(7): bicyclic nucleic acid (BNA)
  modified_base (8)..(8): 5-methyl bicyclic nucleic acid
  source: /note="3' tri-ethylene glycol (TEG)"
guucugtc

SEQ ID NO: 20260 - DNA, 20 bp, Artificial Sequence
  source: /note="Description of Artificial Sequence: Synthetic oligonucleotide"
  source: /note="Description of Combined DNA/RNA Molecule: Synthetic oligonucleotide"
  source: /note="DNA/RNA"
  source: /note="5' tri-ethylene glycol (TEG)"
  modified_base (5)..(5): 5-methyl modified nucleotide
  modified_base (9)..(9): 5-methyl modified nucleotide
  modified_base (10)..(10): 5-methyl modified nucleotide
  modified_base (14)..(14): 5-methyl modified nucleotide
  modified_base (15)..(15): 5-methyl modified nucleotide
  modified_base (16)..(16): 5-methyl modified nucleotide
  modified_base (19)..(19): bicyclic nucleic acid (BNA)
  modified_base (20)..(20): bicyclic nucleic acid (BNA)
  source: /note="3' tri-ethylene glycol (TEG)"
aguucuguccaagcccggtt

SEQ ID NO: 20261 - DNA, 19 bp, Artificial Sequence
  source: /note="Description of Artificial Sequence: Synthetic oligonucleotide"
  source: /note="Description of Combined DNA/RNA Molecule: Synthetic oligonucleotide"
  source: /note="DNA/RNA"
  source: /note="5' tri-ethylene glycol (TEG)"
  modified_base (5)..(5): 5-methyl modified nucleotide
  modified_base (9)..(9): 5-methyl modified nucleotide
  modified_base (10)..(10): 5-methyl modified nucleotide
  modified_base (14)..(14): 5-methyl modified nucleotide
  modified_base (15)..(15): 5-methyl modified nucleotide
  modified_base (16)..(16): 5-methyl modified nucleotide
  modified_base (18)..(18): bicyclic nucleic acid (BNA)
  modified_base (19)..(19): bicyclic nucleic acid (BNA)
  source: /note="3' tri-ethylene glycol (TEG)"
aguucuguccaagcccggt

SEQ ID NO: 20262 - RNA, 18 nt, Artificial Sequence
  source: /note="Description of Artificial Sequence: Synthetic oligonucleotide"
  source: /note="RNA"
  source: /note="5' tri-ethylene glycol (TEG)"
  modified_base (5)..(5): 5-methyl modified nucleotide
  modified_base (9)..(9): 5-methyl modified nucleotide
  modified_base (10)..(10): 5-methyl modified nucleotide
  modified_base (14)..(14): 5-methyl modified nucleotide
  modified_base (15)..(15): 5-methyl modified nucleotide
  modified_base (16)..(16): 5-methyl modified nucleotide
  modified_base (17)..(17): bicyclic nucleic acid (BNA)
  modified_base (18)..(18): bicyclic nucleic acid (BNA)
  source: /note="3' tri-ethylene glycol (TEG)"
aguucuguccaagcccgg

SEQ ID NO: 20263 - RNA, 17 nt, Artificial Sequence
  source: /note="Description of Artificial Sequence: Synthetic oligonucleotide"
  source: /note="RNA"
  source: /note="5' tri-ethylene glycol (TEG)"
  modified_base (5)..(5): 5-methyl modified nucleotide
  modified_base (9)..(9): 5-methyl modified nucleotide
  modified_base (10)..(10): 5-methyl modified nucleotide
  modified_base (14)..(14): 5-methyl modified nucleotide
  modified_base (15)..(15): 5-methyl modified nucleotide
  modified_base (16)..(16): 5-methyl bicyclic nucleic acid
  modified_base (17)..(17): bicyclic nucleic acid (BNA)
  source: /note="3' tri-ethylene glycol (TEG)"
aguucuguccaagcccg

SEQ ID NO: 20264 - RNA, 16 nt, Artificial Sequence
  source: /note="Description of Artificial Sequence: Synthetic oligonucleotide"
  source: /note="RNA"
  source: /note="5' tri-ethylene glycol (TEG)"
  modified_base (5)..(5): 5-methyl modified nucleotide
  modified_base (9)..(9): 5-methyl modified nucleotide
  modified_base (10)..(10): 5-methyl modified nucleotide
  modified_base (14)..(14): 5-methyl modified nucleotide
  modified_base (15)..(15): 5-methyl bicyclic nucleic acid
  modified_base (16)..(16): 5-methyl bicyclic nucleic acid
  source: /note="3' tri-ethylene glycol (TEG)"
aguucuguccaagccc

SEQ ID NO: 20265 - RNA, 15 nt, Artificial Sequence
  source: /note="Description of Artificial Sequence: Synthetic oligonucleotide"
  source: /note="RNA"
  source: /note="5' tri-ethylene glycol (TEG)"
  modified_base (5)..(5): 5-methyl modified nucleotide
  modified_base (9)..(9): 5-methyl modified nucleotide
  modified_base (10)..(10): 5-methyl modified nucleotide
  modified_base (14)..(14): 5-methyl bicyclic nucleic acid
  modified_base (15)..(15): 5-methyl bicyclic nucleic acid
  source: /note="3' tri-ethylene glycol (TEG)"
aguucuguccaagcc

SEQ ID NO: 20266 - RNA, 14 nt, Artificial Sequence
  source: /note="Description of Artificial Sequence: Synthetic oligonucleotide"
  source: /note="RNA"
  source: /note="5' tri-ethylene glycol (TEG)"
  modified_base (5)..(5): 5-methyl modified nucleotide
  modified_base (9)..(9): 5-methyl modified nucleotide
  modified_base (10)..(10): 5-methyl modified nucleotide
  modified_base (13)..(13): bicyclic nucleic acid (BNA)
  modified_base (14)..(14): 5-methyl bicyclic nucleic acid
  source: /note="3' tri-ethylene glycol (TEG)"
aguucuguccaagc

SEQ ID NO: 20267 - RNA, 13 nt, Artificial Sequence
  source: /note="Description of Artificial Sequence: Synthetic oligonucleotide"
  source: /note="RNA"
  source: /note="5' tri-ethylene glycol (TEG)"
  modified_base (5)..(5): 5-methyl modified nucleotide
  modified_base (9)..(9): 5-methyl modified nucleotide
  modified_base (10)..(10): 5-methyl modified nucleotide
  modified_base (12)..(12): bicyclic nucleic acid (BNA)
  modified_base (13)..(13): bicyclic nucleic acid (BNA)
  source: /note="3' tri-ethylene glycol (TEG)"
aguucuguccaag

SEQ ID NO: 20268 - RNA, 12 nt, Artificial Sequence
  source: /note="Description of Artificial Sequence: Synthetic oligonucleotide"
  source: /note="RNA"
  source: /note="5' tri-ethylene glycol (TEG)"
  modified_base (5)..(5): 5-methyl modified nucleotide
  modified_base (9)..(9): 5-methyl modified nucleotide
  modified_base (10)..(10): 5-methyl modified nucleotide
  modified_base (11)..(11): bicyclic nucleic acid (BNA)
  modified_base (12)..(12): bicyclic nucleic acid (BNA)
  source: /note="3' tri-ethylene glycol (TEG)"
aguucuguccaa

SEQ ID NO: 20269 - RNA, 11 nt, Artificial Sequence
  source: /note="Description of Artificial Sequence: Synthetic oligonucleotide"
  source: /note="RNA"
  source: /note="5' tri-ethylene glycol (TEG)"
  modified_base (5)..(5): 5-methyl modified nucleotide
  modified_base (9)..(9): 5-methyl modified nucleotide
  modified_base (10)..(10): 5-methyl bicyclic nucleic acid
  modified_base (11)..(11): bicyclic nucleic acid (BNA)
  source: /note="3' tri-ethylene glycol (TEG)"
aguucugucca

SEQ ID NO: 20270 - RNA, 10 nt, Artificial Sequence
  source: /note="Description of Artificial Sequence: Synthetic oligonucleotide"
  source: /note="RNA"
  source: /note="5' tri-ethylene glycol (TEG)"
  modified_base (5)..(5): 5-methyl modified nucleotide
  modified_base (9)..(9): 5-methyl bicyclic nucleic acid
  modified_base (10)..(10): 5-methyl bicyclic nucleic acid
  source: /note="3' tri-ethylene glycol (TEG)"
aguucugucc

SEQ ID NO: 20271 - DNA, 9 bp, Artificial Sequence
  source: /note="Description of Artificial Sequence: Synthetic oligonucleotide"
  source: /note="Description of Combined DNA/RNA Molecule: Synthetic oligonucleotide"
  source: /note="DNA/RNA"
  source: /note="5' tri-ethylene glycol (TEG)"
  modified_base (5)..(5): 5-methyl modified nucleotide
  modified_base (8)..(8): bicyclic nucleic acid (BNA)
  modified_base (9)..(9): 5-methyl bicyclic nucleic acid
  source: /note="3' tri-ethylene glycol (TEG)"
aguucugtc

SEQ ID NO: 20272 - DNA, 8 bp, Artificial Sequence
  source: /note="Description of Artificial Sequence: Synthetic oligonucleotide"
  source: /note="Description of Combined DNA/RNA Molecule: Synthetic oligonucleotide"
  source: /note="DNA/RNA"
  source: /note="5' tri-ethylene glycol (TEG)"
  modified_base (5)..(5): 5-methyl modified nucleotide
  modified_base (7)..(7): bicyclic nucleic acid (BNA)
  modified_base (8)..(8): bicyclic nucleic acid (BNA)
  source: /note="3' tri-ethylene glycol (TEG)"
aguucugt

SEQ ID NO: 20273 - DNA, 20 bp, Artificial Sequence
  source: /note="Description of Artificial Sequence: Synthetic oligonucleotide"
  source: /note="Description of Combined DNA/RNA Molecule: Synthetic oligonucleotide"
  source: /note="DNA/RNA"
  source: /note="5' tri-ethylene glycol (TEG)"
  modified_base (6)..(6): 5-methyl modified nucleotide
  modified_base (10)..(10): 5-methyl modified nucleotide
  modified_base (11)..(11): 5-methyl modified nucleotide
  modified_base (15)..(15): 5-methyl modified nucleotide
  modified_base (16)..(16): 5-methyl modified nucleotide
  modified_base (17)..(17): 5-methyl modified nucleotide
  modified_base (19)..(19): bicyclic nucleic acid (BNA)
  modified_base (20)..(20): bicyclic nucleic acid (BNA)
  source: /note="3' tri-ethylene glycol (TEG)"
aaguucuguccaagcccggt

SEQ ID NO: 20274 - RNA, 19 nt, Artificial Sequence
  source: /note="Description of Artificial Sequence: Synthetic oligonucleotide"
  source: /note="RNA"
  source: /note="5' tri-ethylene glycol (TEG)"
  modified_base (6)..(6): 5-methyl modified nucleotide
  modified_base (10)..(10): 5-methyl modified nucleotide
  modified_base (11)..(11): 5-methyl modified nucleotide
  modified_base (15)..(15): 5-methyl modified nucleotide
  modified_base (16)..(16): 5-methyl modified nucleotide
  modified_base (17)..(17): 5-methyl modified nucleotide
  modified_base (18)..(18): bicyclic nucleic acid (BNA)
  modified_base (19)..(19): bicyclic nucleic acid (BNA)
  source: /note="3' tri-ethylene glycol (TEG)"
aaguucuguccaagcccgg

SEQ ID NO: 20275 - RNA, 18 nt, Artificial Sequence
  source: /note="Description of Artificial Sequence: Synthetic oligonucleotide"
  source: /note="RNA"
  source: /note="5' tri-ethylene glycol (TEG)"
  modified_base (6)..(6): 5-methyl modified nucleotide
  modified_base (10)..(10): 5-methyl modified nucleotide
  modified_base (11)..(11): 5-methyl modified nucleotide
  modified_base (15)..(15): 5-methyl modified nucleotide
  modified_base (16)..(16): 5-methyl modified nucleotide
  modified_base (17)..(17): 5-methyl bicyclic nucleic acid
  modified_base (18)..(18): bicyclic nucleic acid (BNA)
  source: /note="3' tri-ethylene glycol (TEG)"
aaguucuguccaagcccg

SEQ ID NO: 20276 - RNA, 17 nt, Artificial Sequence
  source: /note="Description of Artificial Sequence: Synthetic oligonucleotide"
  source: /note="RNA"
  source: /note="5' tri-ethylene glycol (TEG)"
  modified_base (6)..(6): 5-methyl modified nucleotide
  modified_base (10)..(10): 5-methyl modified nucleotide
  modified_base (11)..(11): 5-methyl modified nucleotide
  modified_base (15)..(15): 5-methyl modified nucleotide
  modified_base (16)..(16): 5-methyl bicyclic nucleic acid
  modified_base (17)..(17): 5-methyl bicyclic nucleic acid
  source: /note="3' tri-ethylene glycol (TEG)"
aaguucuguccaagccc

SEQ ID NO: 20277 - RNA, 16 nt, Artificial Sequence
  source: /note="Description of Artificial Sequence: Synthetic oligonucleotide"
  source: /note="RNA"
  source: /note="5' tri-ethylene glycol (TEG)"
  modified_base (6)..(6): 5-methyl modified nucleotide
  modified_base (10)..(10): 5-methyl modified nucleotide
  modified_base (11)..(11): 5-methyl modified nucleotide
  modified_base (15)..(15): 5-methyl bicyclic nucleic acid
  modified_base (16)..(16): 5-methyl bicyclic nucleic acid
  source: /note="3' tri-ethylene glycol (TEG)"
aaguucuguccaagcc

SEQ ID NO: 20278 - RNA, 15 nt, Artificial Sequence
  source: /note="Description of Artificial Sequence: Synthetic oligonucleotide"
  source: /note="RNA"
  source: /note="5' tri-ethylene glycol (TEG)"
  modified_base (6)..(6): 5-methyl modified nucleotide
  modified_base (10)..(10): 5-methyl modified nucleotide
  modified_base (11)..(11): 5-methyl modified nucleotide
  modified_base (14)..(14): bicyclic nucleic acid (BNA)
  modified_base (15)..(15): 5-methyl bicyclic nucleic acid
  source: /note="3' tri-ethylene glycol (TEG)"
aaguucuguccaagc

SEQ ID NO: 20279 - RNA, 14 nt, Artificial Sequence
  source: /note="Description of Artificial Sequence: Synthetic oligonucleotide"
  source: /note="RNA"
  source: /note="5' tri-ethylene glycol (TEG)"
  modified_base (6)..(6): 5-methyl modified nucleotide
  modified_base (10)..(10): 5-methyl modified nucleotide
  modified_base (11)..(11): 5-methyl modified nucleotide
  modified_base (13)..(13): bicyclic nucleic acid (BNA)
  modified_base (14)..(14): bicyclic nucleic acid (BNA)
  source: /note="3' tri-ethylene glycol (TEG)"
aaguucuguccaag

SEQ ID NO: 20280 - RNA, 13 nt, Artificial Sequence
  source: /note="Description of Artificial Sequence: Synthetic oligonucleotide"
  source: /note="RNA"
  source: /note="5' tri-ethylene glycol (TEG)"
  modified_base (6)..(6): 5-methyl modified nucleotide
  modified_base (10)..(10): 5-methyl modified nucleotide
  modified_base (11)..(11): 5-methyl modified nucleotide
  modified_base (12)..(12): bicyclic nucleic acid (BNA)
  modified_base (13)..(13): bicyclic nucleic acid (BNA)
  source: /note="3' tri-ethylene glycol (TEG)"
aaguucuguccaa

SEQ ID NO: 20281 - RNA, 12 nt, Artificial Sequence
  source: /note="Description of Artificial Sequence: Synthetic oligonucleotide"
  source: /note="RNA"
  source: /note="5' tri-ethylene glycol (TEG)"
  modified_base (6)..(6): 5-methyl modified nucleotide
  modified_base (10)..(10): 5-methyl modified nucleotide
  modified_base (11)..(11): 5-methyl bicyclic nucleic acid
  modified_base (12)..(12): bicyclic nucleic acid (BNA)
  source: /note="3' tri-ethylene glycol (TEG)"
aaguucugucca

SEQ ID NO: 20282 - RNA, 11 nt, Artificial Sequence
  source: /note="Description of Artificial Sequence: Synthetic oligonucleotide"
  source: /note="RNA"
  source: /note="5' tri-ethylene glycol (TEG)"
  modified_base (6)..(6): 5-methyl modified nucleotide
  modified_base (10)..(10): 5-methyl bicyclic nucleic acid
  modified_base (11)..(11): 5-methyl bicyclic nucleic acid
  source: /note="3' tri-ethylene glycol (TEG)"
aaguucugucc

SEQ ID NO: 20283 - DNA, 10 bp, Artificial Sequence
  source: /note="Description of Artificial Sequence: Synthetic oligonucleotide"
  source: /note="Description of Combined DNA/RNA Molecule: Synthetic oligonucleotide"
  source: /note="DNA/RNA"
  source: /note="5' tri-ethylene glycol (TEG)"
  modified_base (6)..(6): 5-methyl modified nucleotide
  modified_base (9)..(9): bicyclic nucleic acid (BNA)
  modified_base (10)..(10): 5-methyl bicyclic nucleic acid
  source: /note="3' tri-ethylene glycol (TEG)"
aaguucugtc

SEQ ID NO: 20284 - DNA, 9 bp, Artificial Sequence
  source: /note="Description of Artificial Sequence: Synthetic oligonucleotide"
  source: /note="Description of Combined DNA/RNA Molecule: Synthetic oligonucleotide"
  source: /note="DNA/RNA"
  source: /note="5' tri-ethylene glycol (TEG)"
  modified_base (6)..(6): 5-methyl modified nucleotide
  modified_base (8)..(8): bicyclic nucleic acid (BNA)
  modified_base (9)..(9): bicyclic nucleic acid (BNA)
  source: /note="3' tri-ethylene glycol (TEG)"
aaguucugt

SEQ ID NO: 20285 - DNA, 8 bp, Artificial Sequence
  source: /note="Description of Artificial Sequence: Synthetic oligonucleotide"
  source: /note="Description of Combined DNA/RNA Molecule: Synthetic oligonucleotide"
  source: /note="DNA/RNA"
  source: /note="5' tri-ethylene glycol (TEG)"
  modified_base (6)..(6): 5-methyl modified nucleotide
  modified_base (7)..(7): bicyclic nucleic acid (BNA)
  modified_base (8)..(8): bicyclic nucleic acid (BNA)
  source: /note="3' tri-ethylene glycol (TEG)"
aaguuctg

SEQ ID NO: 20286 - RNA, 20 nt, Artificial Sequence
  source: /note="Description of Artificial Sequence: Synthetic oligonucleotide"
  source: /note="RNA"
  source: /note="5' tri-ethylene glycol (TEG)"
  modified_base (7)..(7): 5-methyl modified nucleotide
  modified_base (11)..(11): 5-methyl modified nucleotide
  modified_base (12)..(12): 5-methyl modified nucleotide
  modified_base (16)..(16): 5-methyl modified nucleotide
  modified_base (17)..(17): 5-methyl modified nucleotide
  modified_base (18)..(18): 5-methyl modified nucleotide
  modified_base (19)..(19): bicyclic nucleic acid (BNA)
  modified_base (20)..(20): bicyclic nucleic acid (BNA)
  source: /note="3' tri-ethylene glycol (TEG)"
uaaguucuguccaagcccgg

SEQ ID NO: 20287 - RNA, 19 nt, Artificial Sequence
  source: /note="Description of Artificial Sequence: Synthetic oligonucleotide"
  source: /note="RNA"
  source: /note="5' tri-ethylene glycol (TEG)"
  modified_base (7)..(7): 5-methyl modified nucleotide
  modified_base (11)..(11): 5-methyl modified nucleotide
  modified_base (12)..(12): 5-methyl modified nucleotide
  modified_base (16)..(16): 5-methyl modified nucleotide
  modified_base (17)..(17): 5-methyl modified nucleotide
  modified_base (18)..(18): 5-methyl bicyclic nucleic acid
  modified_base (19)..(19): bicyclic nucleic acid (BNA)
  source: /note="3' tri-ethylene glycol (TEG)"
uaaguucuguccaagcccg

SEQ ID NO: 20288 - RNA, 18 nt, Artificial Sequence
  source: /note="Description of Artificial Sequence: Synthetic oligonucleotide"
  source: /note="RNA"
  source: /note="5' tri-ethylene glycol (TEG)"
  modified_base (7)..(7): 5-methyl modified nucleotide
  modified_base (11)..(11): 5-methyl modified nucleotide
  modified_base (12)..(12): 5-methyl modified nucleotide
  modified_base (16)..(16): 5-methyl modified nucleotide
  modified_base (17)..(17): 5-methyl bicyclic nucleic acid
  modified_base (18)..(18): 5-methyl bicyclic nucleic acid
  source: /note="3' tri-ethylene glycol (TEG)"
uaaguucuguccaagccc

SEQ ID NO: 20289 - RNA, 17 nt, Artificial Sequence
  source: /note="Description of Artificial Sequence: Synthetic oligonucleotide"
  source: /note="RNA"
  source: /note="5' tri-ethylene glycol (TEG)"
  modified_base (7)..(7): 5-methyl modified nucleotide
  modified_base (11)..(11): 5-methyl modified nucleotide
  modified_base (12)..(12): 5-methyl modified nucleotide
  modified_base (16)..(16): 5-methyl bicyclic nucleic acid
  modified_base (17)..(17): 5-methyl bicyclic nucleic acid
  source: /note="3' tri-ethylene glycol (TEG)"
uaaguucuguccaagcc

SEQ ID NO: 20290 - RNA, 16 nt, Artificial Sequence
  source: /note="Description of Artificial Sequence: Synthetic oligonucleotide"
  source: /note="RNA"
  source: /note="5' tri-ethylene glycol (TEG)"
  modified_base (7)..(7): 5-methyl modified nucleotide
  modified_base (11)..(11): 5-methyl modified nucleotide
  modified_base (12)..(12): 5-methyl modified nucleotide
  modified_base (15)..(15): bicyclic nucleic acid (BNA)
  modified_base (16)..(16): 5-methyl bicyclic nucleic acid
  source: /note="3' tri-ethylene glycol (TEG)"
uaaguucuguccaagc

SEQ ID NO: 20291 - RNA, 14 nt, Artificial Sequence
  source: /note="Description of Artificial Sequence: Synthetic oligonucleotide"
  source: /note="RNA"
  source: /note="5' tri-ethylene glycol (TEG)"
  modified_base (7)..(7): 5-methyl modified nucleotide
  modified_base (11)..(11): 5-methyl modified nucleotide
  modified_base (12)..(12): 5-methyl modified nucleotide
  modified_base (13)..(13): bicyclic nucleic acid (BNA)
  modified_base (14)..(14): bicyclic nucleic acid (BNA)
  source: /note="3' tri-ethylene glycol (TEG)"
uaaguucuguccaa

SEQ ID NO: 20292 - RNA, 13 nt, Artificial Sequence
  source: /note="Description of Artificial Sequence: Synthetic oligonucleotide"
  source: /note="RNA"
  source: /note="5' tri-ethylene glycol (TEG)"
  modified_base (7)..(7): 5-methyl modified nucleotide
  modified_base (11)..(11): 5-methyl modified nucleotide
  modified_base (12)..(12): 5-methyl bicyclic nucleic acid
  modified_base (13)..(13): bicyclic nucleic acid (BNA)
  source: /note="3' tri-ethylene glycol (TEG)"
uaaguucugucca

SEQ ID NO: 20293 - RNA, 12 nt, Artificial Sequence
  source: /note="Description of Artificial Sequence: Synthetic oligonucleotide"
  source: /note="RNA"
  source: /note="5' tri-ethylene glycol (TEG)"
  modified_base (7)..(7): 5-methyl modified nucleotide
  modified_base (11)..(11): 5-methyl bicyclic nucleic acid
  modified_base (12)..(12): 5-methyl bicyclic nucleic acid
  source: /note="3' tri-ethylene glycol (TEG)"
uaaguucugucc

SEQ ID NO: 20294 - DNA, 11 bp, Artificial Sequence
  source: /note="Description of Artificial Sequence: Synthetic oligonucleotide"
  source: /note="Description of Combined DNA/RNA Molecule: Synthetic oligonucleotide"
  source: /note="DNA/RNA"
  source: /note="5' tri-ethylene glycol (TEG)"
  modified_base (7)..(7): 5-methyl modified nucleotide
  modified_base (10)..(10): bicyclic nucleic acid (BNA)
  modified_base (11)..(11): 5-methyl bicyclic nucleic acid
  source: /note="3' tri-ethylene glycol (TEG)"
uaaguucugtc

SEQ ID NO: 20295 - DNA, 10 bp, Artificial Sequence
  source: /note="Description of Artificial Sequence: Synthetic oligonucleotide"
  source: /note="Description of Combined DNA/RNA Molecule: Synthetic oligonucleotide"
  source: /note="DNA/RNA"
  source: /note="5' tri-ethylene glycol (TEG)"
  modified_base (7)..(7): 5-methyl modified nucleotide
  modified_base (9)..(9): bicyclic nucleic acid (BNA)
  modified_base (10)..(10): bicyclic nucleic acid (BNA)
  source: /note="3' tri-ethylene glycol (TEG)"
uaaguucugt

SEQ ID NO: 20296 - DNA, 9 bp, Artificial Sequence
  source: /note="Description of Artificial Sequence: Synthetic oligonucleotide"
  source: /note="Description of Combined DNA/RNA Molecule: Synthetic oligonucleotide"
  source: /note="DNA/RNA"
  source: /note="5' tri-ethylene glycol (TEG)"
  modified_base (7)..(7): 5-methyl modified nucleotide
  modified_base (8)..(8): bicyclic nucleic acid (BNA)
  modified_base (9)..(9): bicyclic nucleic acid (BNA)
  source: /note="3' tri-ethylene glycol (TEG)"
uaaguuctg

SEQ ID NO: 20297 - DNA, 8 bp, Artificial Sequence
  source: /note="Description of Artificial Sequence: Synthetic oligonucleotide"
  source: /note="Description of Combined DNA/RNA Molecule: Synthetic oligonucleotide"
  source: /note="DNA/RNA"
  source: /note="5' tri-ethylene glycol (TEG)"
  modified_base (7)..(7): 5-methyl bicyclic nucleic acid
  modified_base (8)..(8): bicyclic nucleic acid (BNA)
  source: /note="3' tri-ethylene glycol (TEG)"
uaaguuct

SEQ ID NO: 20298 - RNA, 20 nt, Artificial Sequence
  source: /note="Description of Artificial Sequence: Synthetic oligonucleotide"
  source: /note="RNA"
  source: /note="5' tri-ethylene glycol (TEG)"
  modified_base (8)..(8): 5-methyl modified nucleotide
  modified_base (12)..(12): 5-methyl modified nucleotide
  modified_base (13)..(13): 5-methyl modified nucleotide
  modified_base (17)..(17): 5-methyl modified nucleotide
  modified_base (18)..(18): 5-methyl modified nucleotide
  modified_base (19)..(19): 5-methyl bicyclic nucleic acid
  modified_base (20)..(20): bicyclic nucleic acid (BNA)
  source: /note="3' tri-ethylene glycol (TEG)"
guaaguucuguccaagcccg

SEQ ID NO: 20299 - RNA, 19 nt, Artificial Sequence
  source: /note="Description of Artificial Sequence: Synthetic oligonucleotide"
  source: /note="RNA"
  source: /note="5' tri-ethylene glycol (TEG)"
  modified_base (8)..(8): 5-methyl modified nucleotide
  modified_base (12)..(12): 5-methyl modified nucleotide
  modified_base (13)..(13): 5-methyl modified nucleotide
  modified_base (17)..(17): 5-methyl modified nucleotide
  modified_base (18)..(18): 5-methyl bicyclic nucleic acid
  modified_base (19)..(19): 5-methyl bicyclic nucleic acid
  source: /note="3' tri-ethylene glycol (TEG)"
guaaguucuguccaagccc

SEQ ID NO: 20300 - RNA, 17 nt, Artificial Sequence
  source: /note="Description of Artificial Sequence: Synthetic oligonucleotide"
  source: /note="RNA"
  source: /note="5' tri-ethylene glycol (TEG)"
  modified_base (8)..(8): 5-methyl modified nucleotide
  modified_base (12)..(12): 5-methyl modified nucleotide
  modified_base (13)..(13): 5-methyl modified nucleotide
  modified_base (16)..(16): bicyclic nucleic acid (BNA)
  modified_base (17)..(17): 5-methyl bicyclic nucleic acid
  source: /note="3' tri-ethylene glycol (TEG)"
guaaguucuguccaagc

SEQ ID NO: 20301 - RNA, 16 nt, Artificial Sequence
  source: /note="Description of Artificial Sequence: Synthetic oligonucleotide"
  source: /note="RNA"
  source: /note="5' tri-ethylene glycol (TEG)"
  modified_base (8)..(8): 5-methyl modified nucleotide
  modified_base (12)..(12): 5-methyl modified nucleotide
  modified_base (13)..(13): 5-methyl modified nucleotide
  modified_base (15)..(15): bicyclic nucleic acid (BNA)
  modified_base (16)..(16): bicyclic nucleic acid (BNA)
  source: /note="3' tri-ethylene glycol (TEG)"
guaaguucuguccaag

SEQ ID NO: 20302 - RNA, 15 nt, Artificial Sequence
  source: /note="Description of Artificial Sequence: Synthetic oligonucleotide"
  source: /note="RNA"
  source: /note="5' tri-ethylene glycol (TEG)"
  modified_base (8)..(8): 5-methyl modified nucleotide
  modified_base (12)..(12): 5-methyl modified nucleotide
  modified_base (13)..(13): 5-methyl modified nucleotide
  modified_base (14)..(14): bicyclic nucleic acid (BNA)
  modified_base (15)..(15): bicyclic nucleic acid (BNA)
  source: /note="3' tri-ethylene glycol (TEG)"
guaaguucuguccaa

SEQ ID NO: 20303 - RNA, 14 nt, Artificial Sequence
  source: /note="Description of Artificial Sequence: Synthetic oligonucleotide"
  source: /note="RNA"
  source: /note="5' tri-ethylene glycol (TEG)"
  modified_base (8)..(8): 5-methyl modified nucleotide
  modified_base (12)..(12): 5-methyl modified nucleotide
  modified_base (13)..(13): 5-methyl bicyclic nucleic acid
  modified_base (14)..(14): bicyclic nucleic acid (BNA)
  source: /note="3' tri-ethylene glycol (TEG)"
guaaguucugucca

SEQ ID NO: 20304 - RNA, 13 nt, Artificial Sequence
  source: /note="Description of Artificial Sequence: Synthetic oligonucleotide"
  source: /note="RNA"
  source: /note="5' tri-ethylene glycol (TEG)"
  modified_base (8)..(8): 5-methyl modified nucleotide
  modified_base (12)..(12): 5-methyl bicyclic nucleic acid
  modified_base (13)..(13): 5-methyl bicyclic nucleic acid
  source: /note="3' tri-ethylene glycol (TEG)"
guaaguucugucc

SEQ ID NO: 20305 - DNA, 12 bp, Artificial Sequence
  source: /note="Description of Artificial Sequence: Synthetic oligonucleotide"
  source: /note="Description of Combined DNA/RNA Molecule: Synthetic oligonucleotide"
  source: /note="DNA/RNA"
  source: /note="5' tri-ethylene glycol (TEG)"
  modified_base (8)..(8): 5-methyl modified nucleotide
  modified_base (11)..(11): bicyclic nucleic acid (BNA)
  modified_base (12)..(12): 5-methyl bicyclic nucleic acid
  source: /note="3' tri-ethylene glycol (TEG)"
guaaguucugtc

SEQ ID NO: 20306 - DNA, 11 bp, Artificial Sequence
  source: /note="Description of Artificial Sequence: Synthetic oligonucleotide"
  source: /note="Description of Combined DNA/RNA Molecule: Synthetic oligonucleotide"
  source: /note="DNA/RNA"
  source: /note="5' tri-ethylene glycol (TEG)"
  modified_base (8)..(8): 5-methyl modified nucleotide
  modified_base (10)..(10): bicyclic nucleic acid (BNA)
  modified_base (11)..(11): bicyclic nucleic acid (BNA)
  source: /note="3' tri-ethylene glycol (TEG)"
guaaguucugt

SEQ ID NO: 20307 - DNA, 10 bp, Artificial Sequence
  source: /note="Description of Artificial Sequence: Synthetic oligonucleotide"
  source: /note="Description of Combined DNA/RNA Molecule: Synthetic oligonucleotide"
  source: /note="DNA/RNA"
  source: /note="5' tri-ethylene glycol (TEG)"
  modified_base (8)..(8): 5-methyl modified nucleotide
  modified_base (9)..(9): bicyclic nucleic acid (BNA)
  modified_base (10)..(10): bicyclic nucleic acid (BNA)
  source: /note="3' tri-ethylene glycol (TEG)"
guaaguuctg

SEQ ID NO: 20308 - DNA, 9 bp, Artificial Sequence
  source: /note="Description of Artificial Sequence: Synthetic oligonucleotide"
  source: /note="Description of Combined DNA/RNA Molecule: Synthetic oligonucleotide"
  source: /note="DNA/RNA"
  source: /note="5' tri-ethylene glycol (TEG)"
  modified_base (8)..(8): 5-methyl bicyclic nucleic acid
  modified_base (9)..(9): bicyclic nucleic acid (BNA)
  source: /note="3' tri-ethylene glycol (TEG)"
guaaguuct

SEQ ID NO: 20309 - DNA, 8 bp, Artificial Sequence
  source: /note="Description of Artificial Sequence: Synthetic oligonucleotide"
  source: /note="Description of Combined DNA/RNA Molecule: Synthetic oligonucleotide"
  source: /note="DNA/RNA"
  source: /note="5' tri-ethylene glycol (TEG)"
  modified_base (7)..(7): bicyclic nucleic acid (BNA)
  modified_base (8)..(8): 5-methyl bicyclic nucleic acid
  source: /note="3' tri-ethylene glycol (TEG)"
guaagutc

SEQ ID NO: 20310 - RNA, 20 nt, Artificial Sequence
  source: /note="Description of Artificial Sequence: Synthetic oligonucleotide"
  source: /note="RNA"
  source: /note="5' tri-ethylene glycol (TEG)"
  modified_base (9)..(9): 5-methyl modified nucleotide
  modified_base (13)..(13): 5-methyl modified nucleotide
  modified_base (14)..(14): 5-methyl modified nucleotide
  modified_base (18)..(18): 5-methyl modified nucleotide
  modified_base (19)..(19): 5-methyl bicyclic nucleic acid
  modified_base (20)..(20): 5-methyl bicyclic nucleic acid
  source: /note="3' tri-ethylene glycol (TEG)"
gguaaguucuguccaagccc

SEQ ID NO: 20311 - RNA, 19 nt, Artificial Sequence
  source: /note="Description of Artificial Sequence: Synthetic oligonucleotide"
  source: /note="RNA"
  source: /note="5' tri-ethylene glycol (TEG)"
  modified_base (9)..(9): 5-methyl modified nucleotide
  modified_base (13)..(13): 5-methyl modified nucleotide
  modified_base (14)..(14): 5-methyl modified nucleotide
  modified_base (18)..(18): 5-methyl bicyclic nucleic acid
  modified_base (19)..(19): 5-methyl bicyclic nucleic acid
  source: /note="3' tri-ethylene glycol (TEG)"
gguaaguucuguccaagcc

SEQ ID NO: 20312 - RNA, 17 nt, Artificial Sequence
  source: /note="Description of Artificial Sequence: Synthetic oligonucleotide"
  source: /note="RNA"
  source: /note="5' tri-ethylene glycol (TEG)"
  modified_base (9)..(9): 5-methyl modified nucleotide
  modified_base (13)..(13): 5-methyl modified nucleotide
  modified_base (14)..(14): 5-methyl modified nucleotide
  modified_base (16)..(16): bicyclic nucleic acid (BNA)
  modified_base (17)..(17): bicyclic nucleic acid (BNA)
  source: /note="3' tri-ethylene glycol (TEG)"
gguaaguucuguccaag

SEQ ID NO: 20313 - RNA, 16 nt, Artificial Sequence
  source: /note="Description of Artificial Sequence: Synthetic oligonucleotide"
  source: /note="RNA"
  source: /note="5' tri-ethylene glycol (TEG)"
  modified_base (9)..(9): 5-methyl modified nucleotide
  modified_base (13)..(13): 5-methyl modified nucleotide
  modified_base (14)..(14): 5-methyl modified nucleotide
  modified_base (15)..(15): bicyclic nucleic acid (BNA)
  modified_base (16)..(16): bicyclic nucleic acid (BNA)
  source: /note="3' tri-ethylene glycol (TEG)"
gguaaguucuguccaa

SEQ ID NO: 20314 - RNA, 15 nt, Artificial Sequence
  source: /note="Description of Artificial Sequence: Synthetic oligonucleotide"
  source: /note="RNA"
  source: /note="5' tri-ethylene glycol (TEG)"
  modified_base (9)..(9): 5-methyl modified nucleotide
  modified_base (13)..(13): 5-methyl modified nucleotide
  modified_base (14)..(14): 5-methyl bicyclic nucleic acid
  modified_base (15)..(15): bicyclic nucleic acid (BNA)
  source: /note="3' tri-ethylene glycol (TEG)"
gguaaguucugucca

SEQ ID NO: 20315 - RNA, 14 nt, Artificial Sequence
  source: /note="Description of Artificial Sequence: Synthetic oligonucleotide"
  source: /note="RNA"
  source: /note="5' tri-ethylene glycol (TEG)"
  modified_base (9)..(9): 5-methyl modified nucleotide
  modified_base (13)..(13): 5-methyl bicyclic nucleic acid
  modified_base (14)..(14): 5-methyl bicyclic nucleic acid
  source: /note="3' tri-ethylene glycol (TEG)"
gguaaguucugucc

SEQ ID NO: 20316 - DNA, 13 bp, Artificial Sequence
  source: /note="Description of Artificial Sequence: Synthetic oligonucleotide"
  source: /note="Description of Combined DNA/RNA Molecule: Synthetic oligonucleotide"
  source: /note="DNA/RNA"
  source: /note="5' tri-ethylene glycol (TEG)"
  modified_base (9)..(9): 5-methyl modified nucleotide
  modified_base (12)..(12): bicyclic nucleic acid (BNA)
  modified_base (13)..(13): 5-methyl bicyclic nucleic acid
  source: /note="3' tri-ethylene glycol (TEG)"
gguaaguucugtc

SEQ ID NO: 20317 - DNA, 12 bp, Artificial Sequence
  source: /note="Description of Artificial Sequence: Synthetic oligonucleotide"
  source: /note="Description of Combined DNA/RNA Molecule: Synthetic oligonucleotide"
  source: /note="DNA/RNA"
  source: /note="5' tri-ethylene glycol (TEG)"
  modified_base (9)..(9): 5-methyl modified nucleotide
  modified_base (11)..(11): bicyclic nucleic acid (BNA)
  modified_base (12)..(12): bicyclic nucleic acid (BNA)
  source: /note="3' tri-ethylene glycol (TEG)"
gguaaguucugt

SEQ ID NO: 20318 - DNA, 11 bp, Artificial Sequence
  source: /note="Description of Artificial Sequence: Synthetic oligonucleotide"
  source: /note="Description of Combined DNA/RNA Molecule: Synthetic oligonucleotide"
  source: /note="DNA/RNA"
  source: /note="5' tri-ethylene glycol (TEG)"
  modified_base (9)..(9): 5-methyl modified nucleotide
  modified_base (10)..(10): bicyclic nucleic acid (BNA)
  modified_base (11)..(11): bicyclic nucleic acid (BNA)
  source: /note="3' tri-ethylene glycol (TEG)"
gguaaguuctg

SEQ ID NO: 20319 - DNA, 10 bp, Artificial Sequence
  source: /note="Description of Artificial Sequence: Synthetic oligonucleotide"
  source: /note="Description of Combined DNA/RNA Molecule: Synthetic oligonucleotide"
  source: /note="DNA/RNA"
  source: /note="5' tri-ethylene glycol (TEG)"
  modified_base (9)..(9): 5-methyl bicyclic nucleic acid
  modified_base (10)..(10): bicyclic nucleic acid (BNA)
  source: /note="3' tri-ethylene glycol (TEG)"
gguaaguuct

SEQ ID NO: 20320 - DNA, 9 bp, Artificial Sequence
  source: /note="Description of Artificial Sequence: Synthetic oligonucleotide"
  source: /note="Description of Combined DNA/RNA Molecule: Synthetic oligonucleotide"
  source: /note="DNA/RNA"
  source: /note="5' tri-ethylene glycol (TEG)"
  modified_base (8)..(8): bicyclic nucleic acid (BNA)
  modified_base (9)..(9): 5-methyl bicyclic nucleic acid
  source: /note="3' tri-ethylene glycol (TEG)"
gguaagutc

SEQ ID NO: 20321 - DNA, 8 bp, Artificial Sequence
  source: /note="Description of Artificial Sequence: Synthetic oligonucleotide"
  source: /note="Description of Combined DNA/RNA Molecule: Synthetic oligonucleotide"
  source: /note="DNA/RNA"
  source: /note="5' tri-ethylene glycol (TEG)"
  modified_base (7)..(7): bicyclic nucleic acid (BNA)
  modified_base (8)..(8): bicyclic nucleic acid (BNA)
  source: /note="3' tri-ethylene glycol (TEG)"
gguaagtt

SEQ ID NO: 20322 - RNA, 20 nt, Artificial Sequence
  source: /note="Description of Artificial Sequence: Synthetic oligonucleotide"
  source: /note="RNA"
  source: /note="5' tri-ethylene glycol (TEG)"
  modified_base (1)..(1): 5-methyl modified nucleotide
  modified_base (10)..(10): 5-methyl modified nucleotide
  modified_base (14)..(14): 5-methyl modified nucleotide
  modified_base (15)..(15): 5-methyl modified nucleotide
  modified_base (19)..(19): 5-methyl bicyclic nucleic acid
  modified_base (20)..(20): 5-methyl bicyclic nucleic acid
  source: /note="3' tri-ethylene glycol (TEG)"
cgguaaguucuguccaagcc

SEQ ID NO: 20323 - RNA, 19 nt, Artificial Sequence
  source: /note="Description of Artificial Sequence: Synthetic oligonucleotide"
  source: /note="RNA"
  source: /note="5' tri-ethylene glycol (TEG)"
  modified_base (1)..(1): 5-methyl modified nucleotide
  modified_base (10)..(10): 5-methyl modified nucleotide
  modified_base (14)..(14): 5-methyl modified nucleotide
  modified_base (15)..(15): 5-methyl modified nucleotide
  modified_base (18)..(18): bicyclic nucleic acid (BNA)
  modified_base (19)..(19): 5-methyl bicyclic nucleic acid
  source: /note="3' tri-ethylene glycol (TEG)"
cgguaaguucuguccaagc

SEQ ID NO: 20324 - RNA, 18 nt, Artificial Sequence
  source: /note="Description of Artificial Sequence: Synthetic oligonucleotide"
  source: /note="RNA"
  source: /note="5' tri-ethylene glycol (TEG)"
  modified_base (1)..(1): 5-methyl modified nucleotide
  modified_base (10)..(10): 5-methyl modified nucleotide
  modified_base (14)..(14): 5-methyl modified nucleotide
  modified_base (15)..(15): 5-methyl modified nucleotide
  modified_base (17)..(17): bicyclic nucleic acid (BNA)
  modified_base (18)..(18): bicyclic nucleic acid (BNA)
  source: /note="3' tri-ethylene glycol (TEG)"
cgguaaguucuguccaag

SEQ ID NO: 20325 - RNA, 17 nt, Artificial Sequence
  source: /note="Description of Artificial Sequence: Synthetic oligonucleotide"
  source: /note="RNA"
  source: /note="5' tri-ethylene glycol (TEG)"
  modified_base (1)..(1): 5-methyl modified nucleotide
  modified_base (10)..(10): 5-methyl modified nucleotide
  modified_base (14)..(14): 5-methyl modified nucleotide
  modified_base (15)..(15): 5-methyl modified nucleotide
  modified_base (16)..(16): bicyclic nucleic acid (BNA)
  modified_base (17)..(17): bicyclic nucleic acid (BNA)
  source: /note="3' tri-ethylene glycol (TEG)"
cgguaaguucuguccaa

SEQ ID NO: 20326 - RNA, 16 nt, Artificial Sequence
  source: /note="Description of Artificial Sequence: Synthetic oligonucleotide"
  source: /note="RNA"
  source: /note="5' tri-ethylene glycol (TEG)"
  modified_base (1)..(1): 5-methyl modified nucleotide
  modified_base (10)..(10): 5-methyl modified nucleotide
  modified_base (14)..(14): 5-methyl modified nucleotide
  modified_base (15)..(15): 5-methyl bicyclic nucleic acid
  modified_base (16)..(16): bicyclic nucleic acid (BNA)
  source: /note="3' tri-ethylene glycol (TEG)"
cgguaaguucugucca

SEQ ID NO: 20327 - RNA, 15 nt, Artificial Sequence
  source: /note="Description of Artificial Sequence: Synthetic oligonucleotide"
  source: /note="RNA"
  source: /note="5' tri-ethylene glycol (TEG)"
  modified_base (1)..(1): 5-methyl modified nucleotide
  modified_base (10)..(10): 5-methyl modified nucleotide
  modified_base (14)..(14): 5-methyl bicyclic nucleic acid
  modified_base (15)..(15): 5-methyl bicyclic nucleic acid
  source: /note="3' tri-ethylene glycol (TEG)"
cgguaaguucugucc

SEQ ID NO: 20328 - DNA, 14 bp, Artificial Sequence
  source: /note="Description of Artificial Sequence: Synthetic oligonucleotide"
  source: /note="Description of Combined DNA/RNA Molecule: Synthetic oligonucleotide"
  source: /note="DNA/RNA"
  source: /note="5' tri-ethylene glycol (TEG)"
  modified_base (1)..(1): 5-methyl modified nucleotide
  modified_base (10)..(10): 5-methyl modified nucleotide
  modified_base (13)..(13): bicyclic nucleic acid (BNA)
  modified_base (14)..(14): 5-methyl bicyclic nucleic acid
  source: /note="3' tri-ethylene glycol (TEG)"
cgguaaguucugtc

SEQ ID NO: 20329 - DNA, 13 bp, Artificial Sequence
  source: /note="Description of Artificial Sequence: Synthetic oligonucleotide"
  source: /note="Description of Combined DNA/RNA Molecule: Synthetic oligonucleotide"
  source: /note="DNA/RNA"
  source: /note="5' tri-ethylene glycol (TEG)"
  modified_base (1)..(1): 5-methyl modified nucleotide
  modified_base (10)..(10): 5-methyl modified nucleotide
  modified_base (12)..(12): bicyclic nucleic acid (BNA)
  modified_base (13)..(13): bicyclic nucleic acid (BNA)
  source: /note="3' tri-ethylene glycol (TEG)"
cgguaaguucugt

SEQ ID NO: 20330 - DNA, 12 bp, Artificial Sequence
  source: /note="Description of Artificial Sequence: Synthetic oligonucleotide"
  source: /note="Description of Combined DNA/RNA Molecule: Synthetic oligonucleotide"
  source: /note="DNA/RNA"
  source: /note="5' tri-ethylene glycol (TEG)"
  modified_base (1)..(1): 5-methyl modified nucleotide
  modified_base (10)..(10): 5-methyl modified nucleotide
  modified_base (11)..(11): bicyclic nucleic acid (BNA)
  modified_base (12)..(12): bicyclic nucleic acid (BNA)
  source: /note="3' tri-ethylene glycol (TEG)"
cgguaaguuctg

SEQ ID NO: 20331 - DNA, 11 bp, Artificial Sequence
  source: /note="Description of Artificial Sequence: Synthetic oligonucleotide"
  source: /note="Description of Combined DNA/RNA Molecule: Synthetic oligonucleotide"
  source: /note="DNA/RNA"
  source: /note="5' tri-ethylene glycol (TEG)"
  modified_base (1)..(1): 5-methyl modified nucleotide
  modified_base (10)..(10): 5-methyl bicyclic nucleic acid
  modified_base (11)..(11): bicyclic nucleic acid (BNA)
  source: /note="3' tri-ethylene glycol (TEG)"
cgguaaguuct

SEQ ID NO: 20332 - DNA, 10 bp, Artificial Sequence
  source: /note="Description of Artificial Sequence: Synthetic oligonucleotide"
  source: /note="Description of Combined DNA/RNA Molecule: Synthetic oligonucleotide"
  source: /note="DNA/RNA"
  source: /note="5' tri-ethylene glycol (TEG)"
  modified_base (1)..(1): 5-methyl modified nucleotide
  modified_base (9)..(9): bicyclic nucleic acid (BNA)
  modified_base (10)..(10): 5-methyl bicyclic nucleic acid
  source: /note="3' tri-ethylene glycol (TEG)"
cgguaagutc

SEQ ID NO: 20333 - DNA, 9 bp, Artificial Sequence
  source: /note="Description of Artificial Sequence: Synthetic oligonucleotide"
  source: /note="Description of Combined DNA/RNA Molecule: Synthetic oligonucleotide"
  source: /note="DNA/RNA"
  source: /note="5' tri-ethylene glycol (TEG)"
  modified_base (1)..(1): 5-methyl modified nucleotide
  modified_base (8)..(8): bicyclic nucleic acid (BNA)
  modified_base (9)..(9): bicyclic nucleic acid (BNA)
  source: /note="3' tri-ethylene glycol (TEG)"
cgguaagtt

SEQ ID NO: 20334 - DNA, 8 bp, Artificial Sequence
  source: /note="Description of Artificial Sequence: Synthetic oligonucleotide"
  source: /note="Description of Combined DNA/RNA Molecule: Synthetic oligonucleotide"
  source: /note="DNA/RNA"
  source: /note="5' tri-ethylene glycol (TEG)"
  modified_base (1)..(1): 5-methyl modified nucleotide
  modified_base (7)..(7): bicyclic nucleic acid (BNA)
  modified_base (8)..(8): bicyclic nucleic acid (BNA)
  source: /note="3' tri-ethylene glycol (TEG)"
cgguaagt

SEQ ID NO: 20335 - RNA, 20 nt, Artificial Sequence
  source: /note="Description of Artificial Sequence: Synthetic oligonucleotide"
  source: /note="RNA"
  source: /note="5' tri-ethylene glycol (TEG)"
  modified_base (2)..(2): 5-methyl modified nucleotide
  modified_base (11)..(11): 5-methyl modified nucleotide
  modified_base (15)..(15): 5-methyl modified nucleotide
  modified_base (16)..(16): 5-methyl modified nucleotide
  modified_base (19)..(19): bicyclic nucleic acid (BNA)
  modified_base (20)..(20): 5-methyl bicyclic nucleic acid
  source: /note="3' tri-ethylene glycol (TEG)"
ucgguaaguucuguccaagc

SEQ ID NO: 20336 - RNA, 19 nt, Artificial Sequence
  source: /note="Description of Artificial Sequence: Synthetic oligonucleotide"
  source: /note="RNA"
  source: /note="5' tri-ethylene glycol (TEG)"
  modified_base (2)..(2): 5-methyl modified nucleotide
  modified_base (11)..(11): 5-methyl modified nucleotide
  modified_base (15)..(15): 5-methyl modified nucleotide
  modified_base (16)..(16): 5-methyl modified nucleotide
  modified_base (18)..(18): bicyclic nucleic acid (BNA)
  modified_base (19)..(19): bicyclic nucleic acid (BNA)
  source: /note="3' tri-ethylene glycol (TEG)"
ucgguaaguucuguccaag

SEQ ID NO: 20337 - RNA, 18 nt, Artificial Sequence
  source: /note="Description of Artificial Sequence: Synthetic oligonucleotide"
  source: /note="RNA"
  source: /note="5' tri-ethylene glycol (TEG)"
  modified_base (2)..(2): 5-methyl modified nucleotide
  modified_base (11)..(11): 5-methyl modified nucleotide
  modified_base (15)..(15): 5-methyl modified nucleotide
  modified_base (16)..(16): 5-methyl modified nucleotide
  modified_base (17)..(17): bicyclic nucleic acid (BNA)
  modified_base (18)..(18): bicyclic nucleic acid (BNA)
  source: /note="3' tri-ethylene glycol (TEG)"
ucgguaaguucuguccaa

SEQ ID NO: 20338 - RNA, 17 nt, Artificial Sequence
  source: /note="Description of Artificial Sequence: Synthetic oligonucleotide"
  source: /note="RNA"
  source: /note="5' tri-ethylene glycol (TEG)"
  modified_base (2)..(2): 5-methyl modified nucleotide
  modified_base (11)..(11): 5-methyl modified nucleotide
  modified_base (15)..(15): 5-methyl modified nucleotide
  modified_base (16)..(16): 5-methyl bicyclic nucleic acid
  modified_base (17)..(17): bicyclic nucleic acid (BNA)
  source: /note="3' tri-ethylene glycol (TEG)"
ucgguaaguucugucca

SEQ ID NO: 20339 - RNA, 16 nt, Artificial Sequence
  source: /note="Description of Artificial Sequence: Synthetic oligonucleotide"
  source: /note="RNA"
  source: /note="5' tri-ethylene glycol (TEG)"
  modified_base (2)..(2): 5-methyl modified nucleotide
  modified_base (11)..(11): 5-methyl modified nucleotide
  modified_base (15)..(15): 5-methyl bicyclic nucleic acid
  modified_base (16)..(16): 5-methyl bicyclic nucleic acid
  source: /note="3' tri-ethylene glycol (TEG)"
ucgguaaguucugucc

SEQ ID NO: 20340 - DNA, 15 bp, Artificial Sequence
  source: /note="Description of Artificial Sequence: Synthetic oligonucleotide"
  source: /note="Description of Combined DNA/RNA Molecule: Synthetic oligonucleotide"
  source: /note="DNA/RNA"
  source: /note="5' tri-ethylene glycol (TEG)"
  modified_base (2)..(2): 5-methyl modified nucleotide
  modified_base (11)..(11): 5-methyl modified nucleotide
  modified_base (14)..(14): bicyclic nucleic acid (BNA)
  modified_base (15)..(15): 5-methyl bicyclic nucleic acid
  source: /note="3' tri-ethylene glycol (TEG)"
ucgguaaguucugtc

SEQ ID NO: 20341 - DNA, 14 bp, Artificial Sequence
  source: /note="Description of Artificial Sequence: Synthetic oligonucleotide"
  source: /note="Description of Combined DNA/RNA Molecule: Synthetic oligonucleotide"
  source: /note="DNA/RNA"
  source: /note="5' tri-ethylene glycol (TEG)"
  modified_base (2)..(2): 5-methyl modified nucleotide
  modified_base (11)..(11): 5-methyl modified nucleotide
  modified_base (13)..(13): bicyclic nucleic acid (BNA)
  modified_base (14)..(14): bicyclic nucleic acid (BNA)
  source: /note="3' tri-ethylene glycol (TEG)"
ucgguaaguucugt

SEQ ID NO: 20342 - DNA, 13 bp, Artificial Sequence
  source: /note="Description of Artificial Sequence: Synthetic oligonucleotide"
  source: /note="Description of Combined DNA/RNA Molecule: Synthetic oligonucleotide"
  source: /note="DNA/RNA"
  source: /note="5' tri-ethylene glycol (TEG)"
  modified_base (2)..(2): 5-methyl modified nucleotide
  modified_base (11)..(11): 5-methyl modified nucleotide
  modified_base (12)..(12): bicyclic nucleic acid (BNA)
  modified_base (13)..(13): bicyclic nucleic acid (BNA)
  source: /note="3' tri-ethylene glycol (TEG)"
ucgguaaguuctg

SEQ ID NO: 20343 - DNA, 12 bp, Artificial Sequence
  source: /note="Description of Artificial Sequence: Synthetic oligonucleotide"
  source: /note="Description of Combined DNA/RNA Molecule: Synthetic oligonucleotide"
  source: /note="DNA/RNA"
  source: /note="5' tri-ethylene glycol (TEG)"
  modified_base (2)..(2): 5-methyl modified nucleotide
  modified_base (11)..(11): 5-methyl bicyclic nucleic acid
  modified_base (12)..(12): bicyclic nucleic acid (BNA)
  source: /note="3' tri-ethylene glycol (TEG)"
ucgguaaguuct

SEQ ID NO: 20344 - DNA, 11 bp, Artificial Sequence
  source: /note="Description of Artificial Sequence: Synthetic oligonucleotide"
  source: /note="Description of Combined DNA/RNA Molecule: Synthetic oligonucleotide"
  source: /note="DNA/RNA"
  source: /note="5' tri-ethylene glycol (TEG)"
  modified_base (2)..(2): 5-methyl modified nucleotide
  modified_base (10)..(10): bicyclic nucleic acid (BNA)
  modified_base (11)..(11): 5-methyl bicyclic nucleic acid
  source: /note="3' tri-ethylene glycol (TEG)"
ucgguaagutc

SEQ ID NO: 20345 - DNA, 10 bp, Artificial Sequence
  source: /note="Description of Artificial Sequence: Synthetic oligonucleotide"
  source: /note="Description of Combined DNA/RNA Molecule: Synthetic oligonucleotide"
  source: /note="DNA/RNA"
  source: /note="5' tri-ethylene glycol (TEG)"
  modified_base (2)..(2): 5-methyl modified nucleotide
  modified_base (9)..(9): bicyclic nucleic acid (BNA)
  modified_base (10)..(10): bicyclic nucleic acid (BNA)
  source: /note="3' tri-ethylene glycol (TEG)"
ucgguaagtt

SEQ ID NO: 20346 - DNA, 9 bp, Artificial Sequence
  source: /note="Description of Artificial Sequence: Synthetic oligonucleotide"
  source: /note="Description of Combined DNA/RNA Molecule: Synthetic oligonucleotide"
  source: /note="DNA/RNA"
  source: /note="5' tri-ethylene glycol (TEG)"
  modified_base (2)..(2): 5-methyl modified nucleotide
  modified_base (8)..(8): bicyclic nucleic acid (BNA)
  modified_base (9)..(9): bicyclic nucleic acid (BNA)
  source: /note="3' tri-ethylene glycol (TEG)"
ucgguaagt

SEQ ID NO: 20347 - RNA, 20 nt, Artificial Sequence
  source: /note="Description of Artificial Sequence: Synthetic oligonucleotide"
  source: /note="RNA"
  source: /note="5' tri-ethylene glycol (TEG)"
  modified_base (3)..(3): 5-methyl modified nucleotide
  modified_base (12)..(12): 5-methyl modified nucleotide
  modified_base (16)..(16): 5-methyl modified nucleotide
  modified_base (17)..(17): 5-methyl modified nucleotide
  modified_base (19)..(19): bicyclic nucleic acid (BNA)
  modified_base (20)..(20): bicyclic nucleic acid (BNA)
  source: /note="3' tri-ethylene glycol (TEG)"
gucgguaaguucuguccaag

SEQ ID NO: 20348 - RNA, 19 nt, Artificial Sequence
  source: /note="Description of Artificial Sequence: Synthetic oligonucleotide"
  source: /note="RNA"
  source: /note="5' tri-ethylene glycol (TEG)"
  modified_base (3)..(3): 5-methyl modified nucleotide
  modified_base (12)..(12): 5-methyl modified nucleotide
  modified_base (16)..(16): 5-methyl modified nucleotide
  modified_base (17)..(17): 5-methyl modified nucleotide
  modified_base (18)..(18): bicyclic nucleic acid (BNA)
  modified_base (19)..(19): bicyclic nucleic acid (BNA)
  source: /note="3' tri-ethylene glycol (TEG)"
gucgguaaguucuguccaa

SEQ ID NO: 20349 - RNA, 18 nt, Artificial Sequence
  source: /note="Description of Artificial Sequence: Synthetic oligonucleotide"
  source: /note="RNA"
  source: /note="5' tri-ethylene glycol (TEG)"
  modified_base (3)..(3): 5-methyl modified nucleotide
  modified_base (12)..(12): 5-methyl modified nucleotide
  modified_base (16)..(16): 5-methyl modified nucleotide
  modified_base (17)..(17): 5-methyl bicyclic nucleic acid
  modified_base (18)..(18): bicyclic nucleic acid (BNA)
  source: /note="3' tri-ethylene glycol (TEG)"
gucgguaaguucugucca

SEQ ID NO: 20350 - RNA, 17 nt, Artificial Sequence
  source: /note="Description of Artificial Sequence: Synthetic oligonucleotide"
  source: /note="RNA"
  source: /note="5' tri-ethylene glycol (TEG)"
  modified_base (3)..(3): 5-methyl modified nucleotide
  modified_base (12)..(12): 5-methyl modified nucleotide
  modified_base (16)..(16): 5-methyl bicyclic nucleic acid
  modified_base (17)..(17): 5-methyl bicyclic nucleic acid
  source: /note="3' tri-ethylene glycol (TEG)"
gucgguaaguucugucc

SEQ ID NO: 20351 - DNA, 16 bp, Artificial Sequence
  source: /note="Description of Artificial Sequence: Synthetic oligonucleotide"
  source: /note="Description of Combined DNA/RNA Molecule: Synthetic oligonucleotide"
  source: /note="DNA/RNA"
  source: /note="5' tri-ethylene glycol (TEG)"
  modified_base (3)..(3): 5-methyl modified nucleotide
  modified_base (12)..(12): 5-methyl modified nucleotide
  modified_base (15)..(15): bicyclic nucleic acid (BNA)
  modified_base (16)..(16): 5-methyl bicyclic nucleic acid
  source: /note="3' tri-ethylene glycol (TEG)"
gucgguaaguucugtc

SEQ ID NO: 20352 - DNA, 15 bp, Artificial Sequence
  source: /note="Description of Artificial Sequence: Synthetic oligonucleotide"
  source: /note="Description of Combined DNA/RNA Molecule: Synthetic oligonucleotide"
  source: /note="DNA/RNA"
  source: /note="5' tri-ethylene glycol (TEG)"
  modified_base (3)..(3): 5-methyl modified nucleotide
  modified_base (12)..(12): 5-methyl modified nucleotide
  modified_base (14)..(14): bicyclic nucleic acid (BNA)
  modified_base (15)..(15): bicyclic nucleic acid (BNA)
  source: /note="3' tri-ethylene glycol (TEG)"
gucgguaaguucugt

SEQ ID NO: 20353 - DNA, 14 bp, Artificial Sequence
  source: /note="Description of Artificial Sequence: Synthetic oligonucleotide"
  source: /note="Description of Combined DNA/RNA Molecule: Synthetic oligonucleotide"
  source: /note="DNA/RNA"
  source: /note="5' tri-ethylene glycol (TEG)"
  modified_base (3)..(3): 5-methyl modified nucleotide
  modified_base (12)..(12): 5-methyl modified nucleotide
  modified_base (13)..(13): bicyclic nucleic acid (BNA)
  modified_base (14)..(14): bicyclic nucleic acid (BNA)
  source: /note="3' tri-ethylene glycol (TEG)"
gucgguaaguuctg

SEQ ID NO: 20354 - DNA, 13 bp, Artificial Sequence
  source: /note="Description of Artificial Sequence: Synthetic oligonucleotide"
  source: /note="Description of Combined DNA/RNA Molecule: Synthetic oligonucleotide"
  source: /note="DNA/RNA"
  source: /note="5' tri-ethylene glycol (TEG)"
  modified_base (3)..(3): 5-methyl modified nucleotide
  modified_base (12)..(12): 5-methyl bicyclic nucleic acid
  modified_base (13)..(13): bicyclic nucleic acid (BNA)
  source: /note="3' tri-ethylene glycol (TEG)"
gucgguaaguuct

SEQ ID NO: 20355 - DNA, 12 bp, Artificial Sequence
  source: /note="Description of Artificial Sequence: Synthetic oligonucleotide"
  source: /note="Description of Combined DNA/RNA Molecule: Synthetic oligonucleotide"
  source: /note="DNA/RNA"
  source: /note="5' tri-ethylene glycol (TEG)"
  modified_base (3)..(3): 5-methyl modified nucleotide
  modified_base (11)..(11): bicyclic nucleic acid (BNA)
  modified_base (12)..(12): 5-methyl bicyclic nucleic acid
  source: /note="3' tri-ethylene glycol (TEG)"
gucgguaagutc

SEQ ID NO: 20356 - DNA, 11 bp, Artificial Sequence
  source: /note="Description of Artificial Sequence: Synthetic oligonucleotide"
  source: /note="Description of Combined DNA/RNA Molecule: Synthetic oligonucleotide"
  source: /note="DNA/RNA"
  source: /note="5' tri-ethylene glycol (TEG)"
  modified_base (3)..(3): 5-methyl modified nucleotide
  modified_base (10)..(10): bicyclic nucleic acid (BNA)
  modified_base (11)..(11): bicyclic nucleic acid (BNA)
  source: /note="3' tri-ethylene glycol (TEG)"
gucgguaagtt

SEQ ID NO: 20357 - DNA, 10 bp, Artificial Sequence
  source: /note="Description of Artificial Sequence: Synthetic oligonucleotide"
  source: /note="Description of Combined DNA/RNA Molecule: Synthetic oligonucleotide"
  source: /note="DNA/RNA"
  source: /note="5' tri-ethylene glycol (TEG)"
  modified_base (3)..(3): 5-methyl modified nucleotide
  modified_base (9)..(9): bicyclic nucleic acid (BNA)
  modified_base (10)..(10): bicyclic nucleic acid (BNA)
  source: /note="3' tri-ethylene glycol (TEG)"
gucgguaagt

SEQ ID NO: 20358 - RNA, 20 nt, Artificial Sequence
  source: /note="Description of Artificial Sequence: Synthetic oligonucleotide"
  source: /note="RNA"
  source: /note="5' tri-ethylene glycol (TEG)"
  modified_base (4)..(4): 5-methyl modified nucleotide
  modified_base (13)..(13): 5-methyl modified nucleotide
  modified_base (17)..(17): 5-methyl modified nucleotide
  modified_base (18)..(18): 5-methyl modified nucleotide
  modified_base (19)..(19): bicyclic nucleic acid (BNA)
  modified_base (20)..(20): bicyclic nucleic acid (BNA)
  source: /note="3' tri-ethylene glycol (TEG)"
agucgguaaguucuguccaa

SEQ ID NO: 20359 - RNA, 19 nt, Artificial Sequence
  source: /note="Description of Artificial Sequence: Synthetic oligonucleotide"
  source: /note="RNA"
  source: /note="5' tri-ethylene glycol (TEG)"
  modified_base (4)..(4): 5-methyl modified nucleotide
  modified_base (13)..(13): 5-methyl modified nucleotide
  modified_base (17)..(17): 5-methyl modified nucleotide
  modified_base (18)..(18): 5-methyl bicyclic nucleic acid
  modified_base (19)..(19): bicyclic nucleic acid (BNA)
  source: /note="3' tri-ethylene glycol (TEG)"
agucgguaaguucugucca

SEQ ID NO: 20360 - DNA, 17 bp, Artificial Sequence
  source: /note="Description of Artificial Sequence: Synthetic oligonucleotide"
  source: /note="Description of Combined DNA/RNA Molecule: Synthetic oligonucleotide"
  source: /note="DNA/RNA"
  source: /note="5' tri-ethylene glycol (TEG)"
  modified_base (4)..(4): 5-methyl modified nucleotide
  modified_base (13)..(13): 5-methyl modified nucleotide
  modified_base (16)..(16): bicyclic nucleic acid (BNA)
  modified_base (17)..(17): 5-methyl bicyclic nucleic acid
  source: /note="3' tri-ethylene glycol (TEG)"
agucgguaaguucugtc

SEQ ID NO: 20361 - DNA, 16 bp, Artificial Sequence
  source: /note="Description of Artificial Sequence: Synthetic oligonucleotide"
  source: /note="Description of Combined DNA/RNA Molecule: Synthetic oligonucleotide"
  source: /note="DNA/RNA"
  source: /note="5' tri-ethylene glycol (TEG)"
  modified_base (4)..(4): 5-methyl modified nucleotide
  modified_base (13)..(13): 5-methyl modified nucleotide
  modified_base (15)..(15): bicyclic nucleic acid (BNA)
  modified_base (16)..(16): bicyclic nucleic acid (BNA)
  source: /note="3' tri-ethylene glycol (TEG)"
agucgguaaguucugt

SEQ ID NO: 20362 - DNA, 15 bp, Artificial Sequence
  source: /note="Description of Artificial Sequence: Synthetic oligonucleotide"
  source: /note="Description of Combined DNA/RNA Molecule: Synthetic oligonucleotide"
  source: /note="DNA/RNA"
  source: /note="5' tri-ethylene glycol (TEG)"
  modified_base (4)..(4): 5-methyl modified nucleotide
  modified_base (13)..(13): 5-methyl modified nucleotide
  modified_base (14)..(14): bicyclic nucleic acid (BNA)
  modified_base (15)..(15): bicyclic nucleic acid (BNA)
  source: /note="3' tri-ethylene glycol (TEG)"
agucgguaaguuctg

SEQ ID NO: 20363 - DNA, 14 bp, Artificial Sequence
  source: /note="Description of Artificial Sequence: Synthetic oligonucleotide"
  source: /note="Description of Combined DNA/RNA Molecule: Synthetic oligonucleotide"
  source: /note="DNA/RNA"
  source: /note="5' tri-ethylene glycol (TEG)"
  modified_base (4)..(4): 5-methyl modified nucleotide
  modified_base (13)..(13): 5-methyl bicyclic nucleic acid
  modified_base (14)..(14): bicyclic nucleic acid (BNA)
  source: /note="3' tri-ethylene glycol (TEG)"
agucgguaaguuct

SEQ ID NO: 20364 - DNA, 13 bp, Artificial Sequence
  source: /note="Description of Artificial Sequence: Synthetic oligonucleotide"
  source: /note="Description of Combined DNA/RNA Molecule: Synthetic oligonucleotide"
  source: /note="DNA/RNA"
  source: /note="5' tri-ethylene glycol (TEG)"
  modified_base (4)..(4): 5-methyl modified nucleotide
  modified_base (12)..(12): bicyclic nucleic acid (BNA)
  modified_base (13)..(13): 5-methyl bicyclic nucleic acid
  source: /note="3' tri-ethylene glycol (TEG)"
agucgguaagutc

SEQ ID NO: 20365 - DNA, 12 bp, Artificial Sequence
  source: /note="Description of Artificial Sequence: Synthetic oligonucleotide"
  source: /note="Description of Combined DNA/RNA Molecule: Synthetic oligonucleotide"
  source: /note="DNA/RNA"
  source: /note="5' tri-ethylene glycol (TEG)"
  modified_base (4)..(4): 5-methyl modified nucleotide
  modified_base (11)..(11): bicyclic nucleic acid (BNA)
  modified_base (12)..(12): bicyclic nucleic acid (BNA)
  source: /note="3' tri-ethylene glycol (TEG)"
agucgguaagtt

SEQ ID NO: 20366 - DNA, 11 bp, Artificial Sequence
  source: /note="Description of Artificial Sequence: Synthetic oligonucleotide"
  source: /note="Description of Combined DNA/RNA Molecule: Synthetic oligonucleotide"
  source: /note="DNA/RNA"
  source: /note="5' tri-ethylene glycol (TEG)"
  modified_base (4)..(4): 5-methyl modified nucleotide
  modified_base (10)..(10): bicyclic nucleic acid (BNA)
  modified_base (11)..(11): bicyclic nucleic acid (BNA)
  source: /note="3' tri-ethylene glycol (TEG)"
agucgguaagt

SEQ ID NO: 20367 - RNA, 20 nt, Artificial Sequence
  source: /note="Description of Artificial Sequence: Synthetic oligonucleotide"
  source: /note="RNA"
  source: /note="5' tri-ethylene glycol (TEG)"
  modified_base (1)..(1): 5-methyl modified nucleotide
  modified_base (5)..(5): 5-methyl modified nucleotide
  modified_base (14)..(14): 5-methyl modified nucleotide
  modified_base (18)..(18): 5-methyl modified nucleotide
  modified_base (19)..(19): 5-methyl bicyclic nucleic acid
  modified_base (20)..(20): bicyclic nucleic acid (BNA)
  source: /note="3' tri-ethylene glycol (TEG)"
cagucgguaaguucugucca

SEQ ID NO: 20368 - RNA, 19 nt, Artificial Sequence
  source: /note="Description of Artificial Sequence: Synthetic oligonucleotide"
  source: /note="RNA"
  source: /note="5' tri-ethylene glycol (TEG)"
  modified_base (1)..(1): 5-methyl modified nucleotide
  modified_base (5)..(5): 5-methyl modified nucleotide
  modified_base (14)..(14): 5-methyl modified nucleotide
  modified_base (18)..(18): 5-methyl bicyclic nucleic acid
  modified_base (19)..(19): 5-methyl bicyclic nucleic acid
  source: /note="3' tri-ethylene glycol (TEG)"
cagucgguaaguucugucc

SEQ ID NO: 20369 - DNA, 18 bp, Artificial Sequence
  source: /note="Description of Artificial Sequence: Synthetic oligonucleotide"
  source: /note="Description of Combined DNA/RNA Molecule: Synthetic oligonucleotide"
  source: /note="DNA/RNA"
  source: /note="5' tri-ethylene glycol (TEG)"
  modified_base (1)..(1): 5-methyl modified nucleotide
  modified_base (5)..(5): 5-methyl modified nucleotide
  modified_base (14)..(14): 5-methyl modified nucleotide
  modified_base (17)..(17): bicyclic nucleic acid (BNA)
  modified_base (18)..(18): 5-methyl bicyclic nucleic acid
  source: /note="3' tri-ethylene glycol (TEG)"
cagucgguaaguucugtc

SEQ ID NO: 20370 - DNA, 17 bp, Artificial Sequence
  source: /note="Description of Artificial Sequence: Synthetic oligonucleotide"
  source: /note="Description of Combined DNA/RNA Molecule: Synthetic oligonucleotide"
  source: /note="DNA/RNA"
  source: /note="5' tri-ethylene glycol (TEG)"
  modified_base (1)..(1): 5-methyl modified nucleotide
  modified_base (5)..(5): 5-methyl modified nucleotide
  modified_base (14)..(14): 5-methyl modified nucleotide
  modified_base (16)..(16): bicyclic nucleic acid (BNA)
  modified_base (17)..(17): bicyclic nucleic acid (BNA)
  source: /note="3' tri-ethylene glycol (TEG)"
cagucgguaaguucugt

SEQ ID NO: 20371 - DNA, 16 bp, Artificial Sequence
  source: /note="Description of Artificial Sequence: Synthetic oligonucleotide"
  source: /note="Description of Combined DNA/RNA Molecule: Synthetic oligonucleotide"
  source: /note="DNA/RNA"
  source: /note="5' tri-ethylene glycol (TEG)"
  modified_base (1)..(1): 5-methyl modified nucleotide
  modified_base (5)..(5): 5-methyl modified nucleotide
  modified_base (14)..(14): 5-methyl modified nucleotide
  modified_base (15)..(15): bicyclic nucleic acid (BNA)
  modified_base (16)..(16): bicyclic nucleic acid (BNA)
  source: /note="3' tri-ethylene glycol (TEG)"
cagucgguaaguuctg

SEQ ID NO: 20372 - DNA, 15 bp, Artificial Sequence
  source: /note="Description of Artificial Sequence: Synthetic oligonucleotide"
  source: /note="Description of Combined DNA/RNA Molecule: Synthetic oligonucleotide"
  source: /note="DNA/RNA"
  source: /note="5' tri-ethylene glycol (TEG)"
  modified_base (1)..(1): 5-methyl modified nucleotide
  modified_base (5)..(5): 5-methyl modified nucleotide
  modified_base (14)..(14): 5-methyl bicyclic nucleic acid
  modified_base (15)..(15): bicyclic nucleic acid (BNA)
  source: /note="3' tri-ethylene glycol (TEG)"
cagucgguaaguuct

SEQ ID NO: 20373 - DNA, 14 bp, Artificial Sequence
  source: /note="Description of Artificial Sequence: Synthetic oligonucleotide"
  source: /note="Description of Combined DNA/RNA Molecule: Synthetic oligonucleotide"
  source: /note="DNA/RNA"
  source: /note="5' tri-ethylene glycol (TEG)"
  modified_base (1)..(1): 5-methyl modified nucleotide
  modified_base (5)..(5): 5-methyl modified nucleotide
  modified_base (13)..(13): bicyclic nucleic acid (BNA)
  modified_base (14)..(14): 5-methyl bicyclic nucleic acid
  source: /note="3' tri-ethylene glycol (TEG)"
cagucgguaagutc

SEQ ID NO: 20374 - DNA, 13 bp, Artificial Sequence
  source: /note="Description of Artificial Sequence: Synthetic oligonucleotide"
  source: /note="Description of Combined DNA/RNA Molecule: Synthetic oligonucleotide"
  source: /note="DNA/RNA"
  source: /note="5' tri-ethylene glycol (TEG)"
  modified_base (1)..(1): 5-methyl modified nucleotide
  modified_base (5)..(5): 5-methyl modified nucleotide
  modified_base (12)..(12): bicyclic nucleic acid (BNA)
  modified_base (13)..(13): bicyclic nucleic acid (BNA)
  source: /note="3' tri-ethylene glycol (TEG)"
cagucgguaagtt

SEQ ID NO: 20375 - DNA, 12 bp, Artificial Sequence
  source: /note="Description of Artificial Sequence: Synthetic oligonucleotide"
  source: /note="Description of Combined DNA/RNA Molecule: Synthetic oligonucleotide"
  source: /note="DNA/RNA"
  source: /note="5' tri-ethylene glycol (TEG)"
  modified_base (1)..(1): 5-methyl modified nucleotide
  modified_base (5)..(5): 5-methyl modified nucleotide
  modified_base (11)..(11): bicyclic nucleic acid (BNA)
  modified_base (12)..(12): bicyclic nucleic acid (BNA)
  source: /note="3' tri-ethylene glycol (TEG)"
cagucgguaagt

SEQ ID NO: 20376 - RNA, 20 nt, Artificial Sequence
  source: /note="Description of Artificial Sequence: Synthetic oligonucleotide"
  source: /note="RNA"
  source: /note="5' tri-ethylene glycol (TEG)"
  modified_base (1)..(1): 5-methyl modified nucleotide
  modified_base (2)..(2): 5-methyl modified nucleotide
  modified_base (6)..(6): 5-methyl modified nucleotide
  modified_base (15)..(15): 5-methyl modified nucleotide
  modified_base (19)..(19): 5-methyl bicyclic nucleic acid
  modified_base (20)..(20): 5-methyl bicyclic nucleic acid
  source: /note="3' tri-ethylene glycol (TEG)"
ccagucgguaaguucugucc

SEQ ID NO: 20377 - DNA, 19 bp, Artificial Sequence
  source: /note="Description of Artificial Sequence: Synthetic oligonucleotide"
  source: /note="Description of Combined DNA/RNA Molecule: Synthetic oligonucleotide"
  source: /note="DNA/RNA"
  source: /note="5' tri-ethylene glycol (TEG)"
  modified_base (1)..(1): 5-methyl modified nucleotide
  modified_base (2)..(2): 5-methyl modified nucleotide
  modified_base (6)..(6): 5-methyl modified nucleotide
  modified_base (15)..(15): 5-methyl modified nucleotide
  modified_base (18)..(18): bicyclic nucleic acid (BNA)
  modified_base (19)..(19): 5-methyl bicyclic nucleic acid
  source: /note="3' tri-ethylene glycol (TEG)"
ccagucgguaaguucugtc

SEQ ID NO: 20378 - DNA, 18 bp, Artificial Sequence
  source: /note="Description of Artificial Sequence: Synthetic oligonucleotide"
  source: /note="Description of Combined DNA/RNA Molecule: Synthetic oligonucleotide"
  source: /note="DNA/RNA"
  source: /note="5' tri-ethylene glycol (TEG)"
  modified_base (1)..(1): 5-methyl modified nucleotide
  modified_base (2)..(2): 5-methyl modified nucleotide
  modified_base (6)..(6): 5-methyl modified nucleotide
  modified_base (15)..(15): 5-methyl modified nucleotide
  modified_base (17)..(17): bicyclic nucleic acid (BNA)
  modified_base (18)..(18): bicyclic nucleic acid (BNA)
  source: /note="3' tri-ethylene glycol (TEG)"
ccagucgguaaguucugt

SEQ ID NO: 20379 - DNA, 17 bp, Artificial Sequence
  source: /note="Description of Artificial Sequence: Synthetic oligonucleotide"
  source: /note="Description of Combined DNA/RNA Molecule: Synthetic oligonucleotide"
  source: /note="DNA/RNA"
  source: /note="5' tri-ethylene glycol (TEG)"
  modified_base (1)..(1): 5-methyl modified nucleotide
  modified_base (2)..(2): 5-methyl modified nucleotide
  modified_base (6)..(6): 5-methyl modified nucleotide
  modified_base (15)..(15): 5-methyl modified nucleotide
  modified_base (16)..(16): bicyclic nucleic acid (BNA)
  modified_base (17)..(17): bicyclic nucleic acid (BNA)
  source: /note="3' tri-ethylene glycol (TEG)"
ccagucgguaaguuctg

SEQ ID NO: 20380 - DNA, 16 bp, Artificial Sequence
  source: /note="Description of Artificial Sequence: Synthetic oligonucleotide"
  source: /note="Description of Combined DNA/RNA Molecule: Synthetic oligonucleotide"
  source: /note="DNA/RNA"
  source: /note="5' tri-ethylene glycol (TEG)"
  modified_base (1)..(1): 5-methyl modified nucleotide
  modified_base (2)..(2): 5-methyl modified nucleotide
  modified_base (6)..(6): 5-methyl modified nucleotide
  modified_base (15)..(15): 5-methyl bicyclic nucleic acid
  modified_base (16)..(16): bicyclic nucleic acid (BNA)
  source: /note="3' tri-ethylene glycol (TEG)"
ccagucgguaaguuct

SEQ ID NO: 20381 - DNA, 15 bp, Artificial Sequence
  source: /note="Description of Artificial Sequence: Synthetic oligonucleotide"
  source: /note="Description of Combined DNA/RNA Molecule: Synthetic oligonucleotide"
  source: /note="DNA/RNA"
  source: /note="5' tri-ethylene glycol (TEG)"
  modified_base (1)..(1): 5-methyl modified nucleotide
  modified_base (2)..(2): 5-methyl modified nucleotide
  modified_base (6)..(6): 5-methyl modified nucleotide
  modified_base (14)..(14): bicyclic nucleic acid (BNA)
  modified_base (15)..(15): 5-methyl bicyclic nucleic acid
  source: /note="3' tri-ethylene glycol (TEG)"
ccagucgguaagutc

SEQ ID NO: 20382 - DNA, 14 bp, Artificial Sequence
  source: /note="Description of Artificial Sequence: Synthetic oligonucleotide"
  source: /note="Description of Combined DNA/RNA Molecule: Synthetic oligonucleotide"
  source: /note="DNA/RNA"
  source: /note="5' tri-ethylene glycol (TEG)"
  modified_base (1)..(1): 5-methyl modified nucleotide
  modified_base (2)..(2): 5-methyl modified nucleotide
  modified_base (6)..(6): 5-methyl modified nucleotide
  modified_base (13)..(13): bicyclic nucleic acid (BNA)
  modified_base (14)..(14): bicyclic nucleic acid (BNA)
  source: /note="3' tri-ethylene glycol (TEG)"
ccagucgguaagtt

SEQ ID NO: 20383 - DNA, 13 bp, Artificial Sequence
  source: /note="Description of Artificial Sequence: Synthetic oligonucleotide"
  source: /note="Description of Combined DNA/RNA Molecule: Synthetic oligonucleotide"
  source: /note="DNA/RNA"
  source: /note="5' tri-ethylene glycol (TEG)"
  modified_base (1)..(1): 5-methyl modified nucleotide
  modified_base (2)..(2): 5-methyl modified nucleotide
  modified_base (6)..(6): 5-methyl modified nucleotide
  modified_base (12)..(12): bicyclic nucleic acid (BNA)
  modified_base (13)..(13): bicyclic nucleic acid (BNA)
  source: /note="3' tri-ethylene glycol (TEG)"
ccagucgguaagt

SEQ ID NO: 20384 - DNA, 20 bp, Artificial Sequence
  source: /note="Description of Artificial Sequence: Synthetic oligonucleotide"
  source: /note="Description of Combined DNA/RNA Molecule: Synthetic oligonucleotide"
  source: /note="DNA/RNA"
  source: /note="5' tri-ethylene glycol (TEG)"
  modified_base (2)..(2): 5-methyl modified nucleotide
  modified_base (3)..(3): 5-methyl modified nucleotide
  modified_base (7)..(7): 5-methyl modified nucleotide
  modified_base (16)..(16): 5-methyl modified nucleotide
  modified_base (19)..(19): bicyclic nucleic acid (BNA)
  modified_base (20)..(20): 5-methyl bicyclic nucleic acid
  source: /note="3' tri-ethylene glycol (TEG)"
gccagucgguaaguucugtc

SEQ ID NO: 20385 - DNA, 19 bp, Artificial Sequence
  source: /note="Description of Artificial Sequence: Synthetic oligonucleotide"
  source: /note="Description of Combined DNA/RNA Molecule: Synthetic oligonucleotide"
  source: /note="DNA/RNA"
  source: /note="5' tri-ethylene glycol (TEG)"
  modified_base (2)..(2): 5-methyl modified nucleotide
  modified_base (3)..(3): 5-methyl modified nucleotide
  modified_base (7)..(7): 5-methyl modified nucleotide
  modified_base (16)..(16): 5-methyl modified nucleotide
  modified_base (18)..(18): bicyclic nucleic acid (BNA)
  modified_base (19)..(19): bicyclic nucleic acid (BNA)
  source: /note="3' tri-ethylene glycol (TEG)"
gccagucgguaaguucugt

SEQ ID NO: 20386 - DNA, 18 bp, Artificial Sequence
  source: /note="Description of Artificial Sequence: Synthetic oligonucleotide"
  source: /note="Description of Combined DNA/RNA Molecule: Synthetic oligonucleotide"
  source: /note="DNA/RNA"
  source: /note="5' tri-ethylene glycol (TEG)"
  modified_base (2)..(2): 5-methyl modified nucleotide
  modified_base (3)..(3): 5-methyl modified nucleotide
  modified_base (7)..(7): 5-methyl modified nucleotide
  modified_base (16)..(16): 5-methyl modified nucleotide
  modified_base (17)..(17): bicyclic nucleic acid (BNA)
  modified_base (18)..(18): bicyclic nucleic acid (BNA)
  source: /note="3' tri-ethylene glycol (TEG)"
gccagucgguaaguuctg

SEQ ID NO: 20387 - DNA, 17 bp, Artificial Sequence
  source: /note="Description of Artificial Sequence: Synthetic oligonucleotide"
  source: /note="Description of Combined DNA/RNA Molecule: Synthetic oligonucleotide"
  source: /note="DNA/RNA"
  source: /note="5' tri-ethylene glycol (TEG)"
  modified_base (2)..(2): 5-methyl modified nucleotide
  modified_base (3)..(3): 5-methyl modified nucleotide
  modified_base (7)..(7): 5-methyl modified nucleotide
  modified_base (16)..(16): 5-methyl bicyclic nucleic acid
  modified_base (17)..(17): bicyclic nucleic acid (BNA)
  source: /note="3' tri-ethylene glycol (TEG)"
gccagucgguaaguuct

SEQ ID NO: 20388 - DNA, 16 bp, Artificial Sequence
  source: /note="Description of Artificial Sequence: Synthetic oligonucleotide"
  source: /note="Description of Combined DNA/RNA Molecule: Synthetic oligonucleotide"
  source: /note="DNA/RNA"
  source: /note="5' tri-ethylene glycol (TEG)"
  modified_base (2)..(2): 5-methyl modified nucleotide
  modified_base (3)..(3): 5-methyl modified nucleotide
  modified_base (7)..(7): 5-methyl modified nucleotide
  modified_base (15)..(15): bicyclic nucleic acid (BNA)
  modified_base (16)..(16): 5-methyl bicyclic nucleic acid
  source: /note="3' tri-ethylene glycol (TEG)"
gccagucgguaagutc

SEQ ID NO: 20389 - DNA, 15 bp, Artificial Sequence
  source: /note="Description of Artificial Sequence: Synthetic oligonucleotide"
  source: /note="Description of Combined DNA/RNA Molecule: Synthetic oligonucleotide"
  source: /note="DNA/RNA"
  source: /note="5' tri-ethylene glycol (TEG)"
  modified_base (2)..(2): 5-methyl modified nucleotide
  modified_base (3)..(3): 5-methyl modified nucleotide
  modified_base (7)..(7): 5-methyl modified nucleotide
  modified_base (14)..(14): bicyclic nucleic acid (BNA)
  modified_base (15)..(15): bicyclic nucleic acid (BNA)
  source: /note="3' tri-ethylene glycol (TEG)"
gccagucgguaagtt

SEQ ID NO: 20390 - DNA, 14 bp, Artificial Sequence
  source: /note="Description of Artificial Sequence: Synthetic oligonucleotide"
  source: /note="Description of Combined DNA/RNA Molecule: Synthetic oligonucleotide"
  source: /note="DNA/RNA"
  source: /note="5' tri-ethylene glycol (TEG)"
  modified_base (2)..(2): 5-methyl modified nucleotide
  modified_base (3)..(3): 5-methyl modified nucleotide
  modified_base (7)..(7): 5-methyl modified nucleotide
  modified_base (13)..(13): bicyclic nucleic acid (BNA)
  modified_base (14)..(14): bicyclic nucleic acid (BNA)
  source: /note="3' tri-ethylene glycol (TEG)"
gccagucgguaagt

SEQ ID NO: 20391 - DNA, 20 bp, Artificial Sequence
  source: /note="Description of Artificial Sequence: Synthetic oligonucleotide"
  source: /note="Description of Combined DNA/RNA Molecule: Synthetic oligonucleotide"
  source: /note="DNA/RNA"
  source: /note="5' tri-ethylene glycol (TEG)"
  modified_base (2)..(2): 5-methyl modified nucleotide
  modified_base (14)..(14): 5-methyl modified nucleotide
  modified_base (19)..(19): 5-methyl bicyclic nucleic acid
  modified_base (20)..(20): bicyclic nucleic acid (BNA)
  source: /note="3' tri-ethylene glycol (TEG)"
ucaaggaagauggcauuuct

SEQ ID NO: 20392 - RNA, 22 nt, Artificial Sequence
  source: /note="Description of Artificial Sequence: Synthetic oligonucleotide"
  source: /note="RNA"
  source: /note="5' tri-ethylene glycol (TEG)"
  modified_base (2)..(2): 5-methyl modified nucleotide
  modified_base (14)..(14): 5-methyl modified nucleotide
  modified_base (19)..(19): 5-methyl modified nucleotide
  modified_base (21)..(21): bicyclic nucleic acid (BNA)
  modified_base (22)..(22): bicyclic nucleic acid (BNA)
  source: /note="3' tri-ethylene glycol (TEG)"
ucaaggaagauggcauuucuag

SEQ ID NO: 20393 - DNA, 16 bp, Artificial Sequence
  source: /note="Description of Artificial Sequence: Synthetic oligonucleotide"
  source: /note="Description of Combined DNA/RNA Molecule: Synthetic oligonucleotide"
  source: /note="DNA/RNA"
  source: /note="5' tri-ethylene glycol (TEG)"
  modified_base (2)..(2): 5-methyl modified nucleotide
  modified_base (14)..(14): 5-methyl modified nucleotide
  modified_base (15)..(15): bicyclic nucleic acid (BNA)
  modified_base (16)..(16): bicyclic nucleic acid (BNA)
  source: /note="3' tri-ethylene glycol (TEG)"
ucaaggaagauggcat

SEQ ID NO: 20394 - DNA, 15 bp, Artificial Sequence
  source: /note="Description of Artificial Sequence: Synthetic oligonucleotide"
  source: /note="Description of Combined DNA/RNA Molecule: Synthetic oligonucleotide"
  source: /note="DNA/RNA"
  source: /note="5' tri-ethylene glycol (TEG)"
  modified_base (9)..(9): 5-methyl modified nucleotide
  modified_base (14)..(14): 5-methyl bicyclic nucleic acid
  modified_base (15)..(15): bicyclic nucleic acid (BNA)
  source: /note="3' tri-ethylene glycol (TEG)"
gaagauggcauuuct

SEQ ID NO: 20395 - DNA, 21 bp, Artificial Sequence
  source: /note="Description of Artificial Sequence: Synthetic oligonucleotide"
  source: /note="Description of Combined DNA/RNA Molecule: Synthetic oligonucleotide"
  source: /note="DNA/RNA"
  source: /note="5' tri-ethylene glycol (TEG)"
  modified_base (2)..(2): 5-methyl modified nucleotide
  modified_base (14)..(14): 5-methyl modified nucleotide
  modified_base (19)..(19): 5-methyl modified nucleotide
  modified_base (20)..(20): bicyclic nucleic acid (BNA)
  modified_base (21)..(21): bicyclic nucleic acid (BNA)
  source: /note="3' tri-ethylene glycol (TEG)"
ucaaggaagauggcauuucta

SEQ ID NO: 20396 - DNA, 19 bp, Artificial Sequence
  source: /note="Description of Artificial Sequence: Synthetic oligonucleotide"
  source: /note="Description of Combined DNA/RNA Molecule: Synthetic oligonucleotide"
  source: /note="DNA/RNA"
  source: /note="5' tri-ethylene glycol (TEG)"
  modified_base (2)..(2): 5-methyl modified nucleotide
  modified_base (14)..(14): 5-methyl modified nucleotide
  modified_base (18)..(18): bicyclic nucleic acid (BNA)
  modified_base (19)..(19): 5-methyl bicyclic nucleic acid
  source: /note="3' tri-ethylene glycol (TEG)"
ucaaggaagauggcauutc

SEQ ID NO: 20397 - DNA, 18 bp, Artificial Sequence
  source: /note="Description of Artificial Sequence: Synthetic oligonucleotide"
  source: /note="Description of Combined DNA/RNA Molecule: Synthetic oligonucleotide"
  source: /note="DNA/RNA"
  source: /note="5' tri-ethylene glycol (TEG)"
  modified_base (2)..(2): 5-methyl modified nucleotide
  modified_base (14)..(14): 5-methyl modified nucleotide
  modified_base (17)..(17): bicyclic nucleic acid (BNA)
  modified_base (18)..(18): bicyclic nucleic acid (BNA)
  source: /note="3' tri-ethylene glycol (TEG)"
ucaaggaagauggcautt

SEQ ID NO: 20398 - DNA, 17 bp, Artificial Sequence
  source: /note="Description of Artificial Sequence: Synthetic oligonucleotide"
  source: /note="Description of Combined DNA/RNA Molecule: Synthetic oligonucleotide"
  source: /note="DNA/RNA"
  source: /note="5' tri-ethylene glycol (TEG)"
  modified_base (2)..(2): 5-methyl modified nucleotide
  modified_base (14)..(14): 5-methyl modified nucleotide
  modified_base (16)..(16): bicyclic nucleic acid (BNA)
  modified_base (17)..(17): bicyclic nucleic acid (BNA)
  source: /note="3' tri-ethylene glycol (TEG)"
ucaaggaagauggcatt

SEQ ID NO: 20399 - RNA, 15 nt, Artificial Sequence
  source: /note="Description of Artificial Sequence: Synthetic oligonucleotide"
  source: /note="RNA"
  source: /note="5' tri-ethylene glycol (TEG)"
  modified_base (2)..(2): 5-methyl modified nucleotide
  modified_base (14)..(14): 5-methyl bicyclic nucleic acid
  modified_base (15)..(15): bicyclic nucleic acid (BNA)
  source: /note="3' tri-ethylene glycol (TEG)"
ucaaggaagauggca

SEQ ID NO: 20400 - RNA, 14 nt, Artificial Sequence
  source: /note="Description of Artificial Sequence: Synthetic oligonucleotide"
  source: /note="RNA"
  source: /note="5' tri-ethylene glycol (TEG)"
  modified_base (2)..(2): 5-methyl modified nucleotide
  modified_base (13)..(13): bicyclic nucleic acid (BNA)
  modified_base (14)..(14): 5-methyl bicyclic nucleic acid
  source: /note="3' tri-ethylene glycol (TEG)"
ucaaggaagauggc

SEQ ID NO: 20401 - RNA, 13 nt, Artificial Sequence
  source: /note="Description of Artificial Sequence: Synthetic oligonucleotide"
  source: /note="RNA"
  source: /note="5' tri-ethylene glycol (TEG)"
  modified_base (2)..(2): 5-methyl modified nucleotide
  modified_base (12)..(12): bicyclic nucleic acid (BNA)
  modified_base (13)..(13): bicyclic nucleic acid (BNA)
  source: /note="3' tri-ethylene glycol (TEG)"
ucaaggaagaugg

SEQ ID NO: 20402 - DNA, 12 bp, Artificial Sequence
  source: /note="Description of Artificial Sequence: Synthetic oligonucleotide"
  source: /note="Description of Combined DNA/RNA Molecule: Synthetic oligonucleotide"
  source: /note="DNA/RNA"
  source: /note="5' tri-ethylene glycol (TEG)"
  modified_base (2)..(2): 5-methyl modified nucleotide
  modified_base (11)..(11): bicyclic nucleic acid (BNA)
  modified_base (12)..(12): bicyclic nucleic acid (BNA)
  source: /note="3' tri-ethylene glycol (TEG)"
ucaaggaagatg

SEQ ID NO: 20403 - DNA, 11 bp, Artificial Sequence
  source: /note="Description of Artificial Sequence: Synthetic oligonucleotide"
  source: /note="Description of Combined DNA/RNA Molecule: Synthetic oligonucleotide"
  source: /note="DNA/RNA"
  source: /note="5' tri-ethylene glycol (TEG)"
  modified_base (2)..(2): 5-methyl modified nucleotide
  modified_base (10)..(10): bicyclic nucleic acid (BNA)
  modified_base (11)..(11): bicyclic nucleic acid (BNA)
  source: /note="3' tri-ethylene glycol (TEG)"
ucaaggaagat

SEQ ID NO: 20404 - RNA, 10 nt, Artificial Sequence
  source: /note="Description of Artificial Sequence: Synthetic oligonucleotide"
  source: /note="RNA"
  source: /note="5' tri-ethylene glycol (TEG)"
  modified_base (2)..(2): 5-methyl modified nucleotide
  modified_base (9)..(9): bicyclic nucleic acid (BNA)
  modified_base (10)..(10): bicyclic nucleic acid (BNA)
  source: /note="3' tri-ethylene glycol (TEG)"
ucaaggaaga

SEQ ID NO: 20405 - RNA, 9 nt, Artificial Sequence
  source: /note="Description of Artificial Sequence: Synthetic oligonucleotide"
  source: /note="RNA"
  source: /note="5' tri-ethylene glycol (TEG)"
  modified_base (2)..(2): 5-methyl modified nucleotide
  modified_base (8)..(8): bicyclic nucleic acid (BNA)
  modified_base (9)..(9): bicyclic nucleic acid (BNA)
  source: /note="3' tri-ethylene glycol (TEG)"
ucaaggaag

SEQ ID NO: 20406 - RNA, 21 nt, Artificial Sequence
  source: /note="Description of Artificial Sequence: Synthetic oligonucleotide"
  source: /note="RNA"
  source: /note="5' tri-ethylene glycol (TEG)"
  modified_base (1)..(1): 5-methyl modified nucleotide
  modified_base (13)..(13): 5-methyl modified nucleotide
  modified_base (18)..(18): 5-methyl modified nucleotide
  modified_base (20)..(20): bicyclic nucleic acid (BNA)
  modified_base (21)..(21): bicyclic nucleic acid (BNA)
  source: /note="3' tri-ethylene glycol (TEG)"
caaggaagauggcauuucuag

SEQ ID NO: 20407 - DNA, 20 bp, Artificial Sequence
  source: /note="Description of Artificial Sequence: Synthetic oligonucleotide"
  source: /note="Description of Combined DNA/RNA Molecule: Synthetic oligonucleotide"
  source: /note="DNA/RNA"
  source: /note="5' tri-ethylene glycol (TEG)"
  modified_base (1)..(1): 5-methyl modified nucleotide
  modified_base (13)..(13): 5-methyl modified nucleotide
  modified_base (18)..(18): 5-methyl modified nucleotide
  modified_base (19)..(19): bicyclic nucleic acid (BNA)
  modified_base (20)..(20): bicyclic nucleic acid (BNA)
  source: /note="3' tri-ethylene glycol (TEG)"
caaggaagauggcauuucta

SEQ ID NO: 20408 - DNA, 19 bp, Artificial Sequence
  source: /note="Description of Artificial Sequence: Synthetic oligonucleotide"
  source: /note="Description of Combined DNA/RNA Molecule: Synthetic oligonucleotide"
  source: /note="DNA/RNA"
  source: /note="5' tri-ethylene glycol (TEG)"
  modified_base (1)..(1): 5-methyl modified nucleotide
  modified_base (13)..(13): 5-methyl modified nucleotide
  modified_base (18)..(18): 5-methyl bicyclic nucleic acid
  modified_base (19)..(19): bicyclic nucleic acid (BNA)
  source: /note="3' tri-ethylene glycol (TEG)"
caaggaagauggcauuuct

SEQ ID NO: 20409 - DNA, 18 bp, Artificial Sequence
  source: /note="Description of Artificial Sequence: Synthetic oligonucleotide"
  source: /note="Description of Combined DNA/RNA Molecule: Synthetic oligonucleotide"
  source: /note="DNA/RNA"
  source: /note="5' tri-ethylene glycol (TEG)"
  modified_base (1)..(1): 5-methyl modified nucleotide
  modified_base (13)..(13): 5-methyl modified nucleotide
  modified_base (17)..(17): bicyclic nucleic acid (BNA)
  modified_base (18)..(18): 5-methyl bicyclic nucleic acid
  source: /note="3' tri-ethylene glycol (TEG)"
caaggaagauggcauutc

SEQ ID NO: 20410 - DNA, 17 bp, Artificial Sequence
  source: /note="Description of Artificial Sequence: Synthetic oligonucleotide"
  source: /note="Description of Combined DNA/RNA Molecule: Synthetic oligonucleotide"
  source: /note="DNA/RNA"
  source: /note="5' tri-ethylene glycol (TEG)"
  modified_base (1)..(1): 5-methyl modified nucleotide
  modified_base (13)..(13): 5-methyl modified nucleotide
  modified_base (16)..(16): bicyclic nucleic acid (BNA)
  modified_base (17)..(17): bicyclic nucleic acid (BNA)
  source: /note="3' tri-ethylene glycol (TEG)"
caaggaagauggcautt

SEQ ID NO: 20411 - DNA, 16 bp, Artificial Sequence
  source: /note="Description of Artificial Sequence: Synthetic oligonucleotide"
  source: /note="Description of Combined DNA/RNA Molecule: Synthetic oligonucleotide"
  source: /note="DNA/RNA"
  source: /note="5' tri-ethylene glycol (TEG)"
  modified_base (1)..(1): 5-methyl modified nucleotide
  modified_base (13)..(13): 5-methyl modified nucleotide
  modified_base (15)..(15): bicyclic nucleic acid (BNA)
  modified_base (16)..(16): bicyclic nucleic acid (BNA)
  source: /note="3' tri-ethylene glycol (TEG)"
caaggaagauggcatt

SEQ ID NO: 20412 - DNA, 15 bp, Artificial Sequence
  source: /note="Description of Artificial Sequence: Synthetic oligonucleotide"
  source: /note="Description of Combined DNA/RNA Molecule: Synthetic oligonucleotide"
  source: /note="DNA/RNA"
  source: /note="5' tri-ethylene glycol (TEG)"
  modified_base (1)..(1): 5-methyl modified nucleotide
  modified_base (13)..(13): 5-methyl modified nucleotide
  modified_base (14)..(14): bicyclic nucleic acid (BNA)
  modified_base (15)..(15): bicyclic nucleic acid (BNA)
  source: /note="3' tri-ethylene glycol (TEG)"
caaggaagauggcat

SEQ ID NO: 20413 - RNA, 14 nt, Artificial Sequence
  source: /note="Description of Artificial Sequence: Synthetic oligonucleotide"
  source: /note="RNA"
  source: /note="5' tri-ethylene glycol (TEG)"
  modified_base (1)..(1): 5-methyl modified nucleotide
  modified_base (13)..(13): 5-methyl bicyclic nucleic acid
  modified_base (14)..(14): bicyclic nucleic acid (BNA)
  source: /note="3' tri-ethylene glycol (TEG)"
caaggaagauggca

SEQ ID NO: 20414 - RNA, 13 nt, Artificial Sequence
  source: /note="Description of Artificial Sequence: Synthetic oligonucleotide"
  source: /note="RNA"
  source: /note="5' tri-ethylene glycol (TEG)"
  modified_base (1)..(1): 5-methyl modified nucleotide
  modified_base (12)..(12): bicyclic nucleic acid (BNA)
  modified_base (13)..(13): 5-methyl bicyclic nucleic acid
  source: /note="3' tri-ethylene glycol (TEG)"
caaggaagauggc

SEQ ID NO: 20415 - RNA, 12 nt, Artificial Sequence
  source: /note="Description of Artificial Sequence: Synthetic oligonucleotide"
  source: /note="RNA"
  source: /note="5' tri-ethylene glycol (TEG)"
  modified_base (1)..(1): 5-methyl modified nucleotide
  modified_base (11)..(11): bicyclic nucleic acid (BNA)
  modified_base (12)..(12): bicyclic nucleic acid (BNA)
  source: /note="3' tri-ethylene glycol (TEG)"
caaggaagaugg

SEQ ID NO: 20416 - DNA, 11 bp, Artificial Sequence
  source: /note="Description of Artificial Sequence: Synthetic oligonucleotide"
  source: /note="DNA/RNA"
  source: /note="5' tri-ethylene glycol (TEG)"
  modified_base (1)..(1): 5-methyl modified nucleotide
  modified_base (10)..(10): bicyclic nucleic acid (BNA)
  modified_base (11)..(11): bicyclic nucleic acid (BNA)
  source: /note="3' tri-ethylene glycol (TEG)"
caaggaagatg

SEQ ID NO: 20417 - DNA, 10 bp, Artificial Sequence
  source: /note="Description of Artificial Sequence: Synthetic oligonucleotide"
  source: /note="DNA/RNA"
  source: /note="5' tri-ethylene glycol (TEG)"
  modified_base (1)..(1): 5-methyl modified nucleotide
  modified_base (9)..(9): bicyclic nucleic acid (BNA)
  modified_base (10)..(10): bicyclic nucleic acid (BNA)
  source: /note="3' tri-ethylene glycol (TEG)"
caaggaagat

SEQ ID NO: 20418 - RNA, 9 nt, Artificial Sequence
  source: /note="Description of Artificial Sequence: Synthetic oligonucleotide"
  source: /note="RNA/Antisense Oligonucleotide"
  source: /note="5' tri-ethylene glycol (TEG)"
  modified_base (1)..(1): 5-methyl modified nucleotide
  modified_base (8)..(8): bicyclic nucleic acid (BNA)
  modified_base (9)..(9): bicyclic nucleic acid (BNA)
  source: /note="3' tri-ethylene glycol (TEG)"
caaggaaga

SEQ ID NO: 20419 - RNA, 8 nt, Artificial Sequence
  source: /note="Description of Artificial Sequence: Synthetic oligonucleotide"
  source: /note="RNA/Antisense Oligonucleotide"
  source: /note="5' tri-ethylene glycol (TEG)"
  modified_base (1)..(1): 5-methyl modified nucleotide
  modified_base (7)..(7): bicyclic nucleic acid (BNA)
  modified_base (8)..(8): bicyclic nucleic acid (BNA)
  source: /note="3' tri-ethylene glycol (TEG)"
caaggaag

SEQ ID NO: 20420 - RNA, 20 nt, Artificial Sequence
  source: /note="Description of Artificial Sequence: Synthetic oligonucleotide"
  source: /note="RNA"
  source: /note="5' tri-ethylene glycol (TEG)"
  modified_base (12)..(12): 5-methyl modified nucleotide
  modified_base (17)..(17): 5-methyl modified nucleotide
  modified_base (19)..(19): bicyclic nucleic acid (BNA)
  modified_base (20)..(20): bicyclic nucleic acid (BNA)
  source: /note="3' tri-ethylene glycol (TEG)"
aaggaagauggcauuucuag

SEQ ID NO: 20421 - DNA, 19 bp, Artificial Sequence
  source: /note="Description of Artificial Sequence: Synthetic oligonucleotide"
  source: /note="Description of Combined DNA/RNA Molecule: Synthetic oligonucleotide"
  source: /note="DNA/RNA"
  source: /note="5' tri-ethylene glycol (TEG)"
  modified_base (12)..(12): 5-methyl modified nucleotide
  modified_base (17)..(17): 5-methyl modified nucleotide
  modified_base (18)..(18): bicyclic nucleic acid (BNA)
  modified_base (19)..(19): bicyclic nucleic acid (BNA)
  source: /note="3' tri-ethylene glycol (TEG)"
aaggaagauggcauuucta

SEQ ID NO: 20422 - DNA, 18 bp, Artificial Sequence
  source: /note="Description of Artificial Sequence: Synthetic oligonucleotide"
  source: /note="Description of Combined DNA/RNA Molecule: Synthetic oligonucleotide"
  source: /note="DNA/RNA"
  source: /note="5' tri-ethylene glycol (TEG)"
  modified_base (12)..(12): 5-methyl modified nucleotide
  modified_base (17)..(17): 5-methyl bicyclic nucleic acid
  modified_base (18)..(18): bicyclic nucleic acid (BNA)
  source: /note="3' tri-ethylene glycol (TEG)"
aaggaagauggcauuuct

SEQ ID NO: 20423 - DNA, 17 bp, Artificial Sequence
  source: /note="Description of Artificial Sequence: Synthetic oligonucleotide"
  source: /note="Description of Combined DNA/RNA Molecule: Synthetic oligonucleotide"
  source: /note="DNA/RNA"
  source: /note="5' tri-ethylene glycol (TEG)"
  modified_base (12)..(12): 5-methyl modified nucleotide
  modified_base (16)..(16): bicyclic nucleic acid (BNA)
  modified_base (17)..(17): 5-methyl bicyclic nucleic acid
  source: /note="3' tri-ethylene glycol (TEG)"
aaggaagauggcauutc

SEQ ID NO: 20424 - DNA, 16 bp, Artificial Sequence
  source: /note="Description of Artificial Sequence: Synthetic oligonucleotide"
  source: /note="Description of Combined DNA/RNA Molecule: Synthetic oligonucleotide"
  source: /note="DNA/RNA"
  source: /note="5' tri-ethylene glycol (TEG)"
  modified_base (12)..(12): 5-methyl modified nucleotide
  modified_base (15)..(15): bicyclic nucleic acid (BNA)
  modified_base (16)..(16): bicyclic nucleic acid (BNA)
  source: /note="3' tri-ethylene glycol (TEG)"
aaggaagauggcautt

SEQ ID NO: 20425 - DNA, 15 bp, Artificial Sequence
  source: /note="Description of Artificial Sequence: Synthetic oligonucleotide"
  source: /note="Description of Combined DNA/RNA Molecule: Synthetic oligonucleotide"
  source: /note="DNA/RNA"
  source: /note="5' tri-ethylene glycol (TEG)"
  modified_base (12)..(12): 5-methyl modified nucleotide
  modified_base (14)..(14): bicyclic nucleic acid (BNA)
  modified_base (15)..(15): bicyclic nucleic acid (BNA)
  source: /note="3' tri-ethylene glycol (TEG)"
aaggaagauggcatt

SEQ ID NO: 20426 - DNA, 14 bp, Artificial Sequence
  source: /note="Description of Artificial Sequence: Synthetic oligonucleotide"
  source: /note="Description of Combined DNA/RNA Molecule: Synthetic oligonucleotide"
  source: /note="DNA/RNA"
  source: /note="5' tri-ethylene glycol (TEG)"
  modified_base (12)..(12): 5-methyl modified nucleotide
  modified_base (13)..(13): bicyclic nucleic acid (BNA)
  modified_base (14)..(14): bicyclic nucleic acid (BNA)
  source: /note="3' tri-ethylene glycol (TEG)"
aaggaagauggcat

SEQ ID NO: 20427 - RNA, 13 nt, Artificial Sequence
  source: /note="Description of Artificial Sequence: Synthetic oligonucleotide"
  source: /note="RNA"
  source: /note="5' tri-ethylene glycol (TEG)"
  modified_base (12)..(12): 5-methyl bicyclic nucleic acid
  modified_base (13)..(13): bicyclic nucleic acid (BNA)
  source: /note="3' tri-ethylene glycol (TEG)"
aaggaagauggca

SEQ ID NO: 20428 - RNA, 12 nt, Artificial Sequence
  source: /note="Description of Artificial Sequence: Synthetic oligonucleotide"
  source: /note="RNA"
  source: /note="5' tri-ethylene glycol (TEG)"
  modified_base (11)..(11): bicyclic nucleic acid (BNA)
  modified_base (12)..(12): 5-methyl bicyclic nucleic acid
  source: /note="3' tri-ethylene glycol (TEG)"
aaggaagauggc

SEQ ID NO: 20429 - RNA, 11 nt, Artificial Sequence
  source: /note="Description of Artificial Sequence: Synthetic oligonucleotide"
  source: /note="RNA"
  source: /note="5' tri-ethylene glycol (TEG)"
  modified_base (10)..(10): bicyclic nucleic acid (BNA)
  modified_base (11)..(11): bicyclic nucleic acid (BNA)
  source: /note="3' tri-ethylene glycol (TEG)"
aaggaagaugg

SEQ ID NO: 20430 - DNA, 10 bp, Artificial Sequence
  source: /note="Description of Artificial Sequence: Synthetic oligonucleotide"
  source: /note="DNA/RNA"
  source: /note="5' tri-ethylene glycol (TEG)"
  modified_base (9)..(9): bicyclic nucleic acid (BNA)
  modified_base (10)..(10): bicyclic nucleic acid (BNA)
  source: /note="3' tri-ethylene glycol (TEG)"
aaggaagatg

SEQ ID NO: 20431 - DNA, 9 bp, Artificial Sequence
  source: /note="Description of Artificial Sequence: Synthetic oligonucleotide"
  source: /note="DNA/RNA"
  source: /note="5' tri-ethylene glycol (TEG)"
  modified_base (8)..(8): bicyclic nucleic acid (BNA)
  modified_base (9)..(9): bicyclic nucleic acid (BNA)
  source: /note="3' tri-ethylene glycol (TEG)"
aaggaagat

SEQ ID NO: 20432 - RNA, 8 nt, Artificial Sequence
  source: /note="Description of Artificial Sequence: Synthetic oligonucleotide"
  source: /note="RNA/Antisense Oligonucleotide"
  source: /note="5' tri-ethylene glycol (TEG)"
  modified_base (7)..(7): bicyclic nucleic acid (BNA)
  modified_base (8)..(8): bicyclic nucleic acid (BNA)
  source: /note="3' tri-ethylene glycol (TEG)"
aaggaaga

SEQ ID NO: 20433 - RNA, 19 nt, Artificial Sequence
  source: /note="Description of Artificial Sequence: Synthetic oligonucleotide"
  source: /note="RNA"
  source: /note="5' tri-ethylene glycol (TEG)"
  modified_base (11)..(11): 5-methyl modified nucleotide
  modified_base (16)..(16): 5-methyl modified nucleotide
  modified_base (18)..(18): bicyclic nucleic acid (BNA)
  modified_base (19)..(19): bicyclic nucleic acid (BNA)
  source: /note="3' tri-ethylene glycol (TEG)"
aggaagauggcauuucuag

SEQ ID NO: 20434 - DNA, 18 bp, Artificial Sequence
  source: /note="Description of Artificial Sequence: Synthetic oligonucleotide"
  source: /note="Description of Combined DNA/RNA Molecule: Synthetic oligonucleotide"
  source: /note="DNA/RNA"
  source: /note="5' tri-ethylene glycol (TEG)"
  modified_base (11)..(11): 5-methyl modified nucleotide
  modified_base (16)..(16): 5-methyl modified nucleotide
  modified_base (17)..(17): bicyclic nucleic acid (BNA)
  modified_base (18)..(18): bicyclic nucleic acid (BNA)
  source: /note="3' tri-ethylene glycol (TEG)"
aggaagauggcauuucta

SEQ ID NO: 20435 - DNA, 17 bp, Artificial Sequence
  source: /note="Description of Artificial Sequence: Synthetic oligonucleotide"
  source: /note="Description of Combined DNA/RNA Molecule: Synthetic oligonucleotide"
  source: /note="DNA/RNA"
  source: /note="5' tri-ethylene glycol (TEG)"
  modified_base (11)..(11): 5-methyl modified nucleotide
  modified_base (16)..(16): 5-methyl bicyclic nucleic acid
  modified_base (17)..(17): bicyclic nucleic acid (BNA)
  source: /note="3' tri-ethylene glycol (TEG)"
aggaagauggcauuuct

SEQ ID NO: 20436 - DNA, 16 bp, Artificial Sequence
  source: /note="Description of Artificial Sequence: Synthetic oligonucleotide"
  source: /note="Description of Combined DNA/RNA Molecule: Synthetic oligonucleotide"
  source: /note="DNA/RNA"
  source: /note="5' tri-ethylene glycol (TEG)"
  modified_base (11)..(11): 5-methyl modified nucleotide
  modified_base (15)..(15): bicyclic nucleic acid (BNA)
  modified_base (16)..(16): 5-methyl bicyclic nucleic acid
  source: /note="3' tri-ethylene glycol (TEG)"
aggaagauggcauutc

SEQ ID NO: 20437 - DNA, 15 bp, Artificial Sequence
  source: /note="Description of Artificial Sequence: Synthetic oligonucleotide"
  source: /note="Description of Combined DNA/RNA Molecule: Synthetic oligonucleotide"
  source: /note="DNA/RNA"
  source: /note="5' tri-ethylene glycol (TEG)"
  modified_base (11)..(11): 5-methyl modified nucleotide
  modified_base (14)..(14): bicyclic nucleic acid (BNA)
  modified_base (15)..(15): bicyclic nucleic acid (BNA)
  source: /note="3' tri-ethylene glycol (TEG)"
aggaagauggcautt

SEQ ID NO: 20438 - DNA, 14 bp, Artificial Sequence
  source: /note="Description of Artificial Sequence: Synthetic oligonucleotide"
  source: /note="Description of Combined DNA/RNA Molecule: Synthetic oligonucleotide"
  source: /note="DNA/RNA"
  source: /note="5' tri-ethylene glycol (TEG)"
  modified_base (11)..(11): 5-methyl modified nucleotide
  modified_base (13)..(13): bicyclic nucleic acid (BNA)
  modified_base (14)..(14): bicyclic nucleic acid (BNA)
  source: /note="3' tri-ethylene glycol (TEG)"
aggaagauggcatt

SEQ ID NO: 20439 - DNA, 13 bp, Artificial Sequence
  source: /note="Description of Artificial Sequence: Synthetic oligonucleotide"
  source: /note="Description of Combined DNA/RNA Molecule: Synthetic oligonucleotide"
  source: /note="DNA/RNA"
  source: /note="5' tri-ethylene glycol (TEG)"
  modified_base (11)..(11): 5-methyl modified nucleotide
  modified_base (12)..(12): bicyclic nucleic acid (BNA)
  modified_base (13)..(13): bicyclic nucleic acid (BNA)
  source: /note="3' tri-ethylene glycol (TEG)"
aggaagauggcat

SEQ ID NO: 20440 - RNA, 12 nt, Artificial Sequence
  source: /note="Description of Artificial Sequence: Synthetic oligonucleotide"
  source: /note="RNA"
  source: /note="5' tri-ethylene glycol (TEG)"
  modified_base (11)..(11): 5-methyl bicyclic nucleic acid
  modified_base (12)..(12): bicyclic nucleic acid (BNA)
  source: /note="3' tri-ethylene glycol (TEG)"
aggaagauggca

SEQ ID NO: 20441 - RNA, 10 nt, Artificial Sequence
  source: /note="Description of Artificial Sequence: Synthetic oligonucleotide"
  source: /note="RNA"
  source: /note="5' tri-ethylene glycol (TEG)"
  modified_base (9)..(9): bicyclic nucleic acid (BNA)
  modified_base (10)..(10): bicyclic nucleic acid (BNA)
  source: /note="3' tri-ethylene glycol (TEG)"
aggaagaugg

SEQ ID NO: 20442 - DNA, 9 bp, Artificial Sequence
  source: /note="Description of Artificial Sequence: Synthetic oligonucleotide"
  source: /note="DNA/RNA"
  source: /note="5' tri-ethylene glycol (TEG)"
  modified_base (8)..(8): bicyclic nucleic acid (BNA)
  modified_base (9)..(9): bicyclic nucleic acid (BNA)
  source: /note="3' tri-ethylene glycol (TEG)"
aggaagatg

SEQ ID NO: 20443 - DNA, 8 bp, Artificial Sequence
  source: /note="Description of Artificial Sequence: Synthetic oligonucleotide"
  source: /note="DNA/RNA"
  source: /note="5' tri-ethylene glycol (TEG)"
  modified_base (7)..(7): bicyclic nucleic acid (BNA)
  modified_base (8)..(8): bicyclic nucleic acid (BNA)
  source: /note="3' tri-ethylene glycol (TEG)"
aggaagat

SEQ ID NO: 20444 - RNA, 18 nt, Artificial Sequence
  source: /note="Description of Artificial Sequence: Synthetic oligonucleotide"
  source: /note="RNA"
  source: /note="5' tri-ethylene glycol (TEG)"
  modified_base (10)..(10): 5-methyl modified nucleotide
  modified_base (15)..(15): 5-methyl modified nucleotide
  modified_base (17)..(17): bicyclic nucleic acid (BNA)
  modified_base (18)..(18): bicyclic nucleic acid (BNA)
  source: /note="3' tri-ethylene glycol (TEG)"
ggaagauggcauuucuag

SEQ ID NO: 20445 - DNA, 17 bp, Artificial Sequence
  source: /note="Description of Artificial Sequence: Synthetic oligonucleotide"
  source: /note="Description of Combined DNA/RNA Molecule: Synthetic oligonucleotide"
  source: /note="DNA/RNA"
  source: /note="5' tri-ethylene glycol (TEG)"
  modified_base (10)..(10): 5-methyl modified nucleotide
  modified_base (15)..(15): 5-methyl modified nucleotide
  modified_base (16)..(16): bicyclic nucleic acid (BNA)
  modified_base (17)..(17): bicyclic nucleic acid (BNA)
  source: /note="3' tri-ethylene glycol (TEG)"
ggaagauggcauuucta

SEQ ID NO: 20446 - DNA, 16 bp, Artificial Sequence
  source: /note="Description of Artificial Sequence: Synthetic oligonucleotide"
  source: /note="Description of Combined DNA/RNA Molecule: Synthetic oligonucleotide"
  source: /note="DNA/RNA"
  source: /note="5' tri-ethylene glycol (TEG)"
  modified_base (10)..(10): 5-methyl modified nucleotide
  modified_base (15)..(15): 5-methyl bicyclic nucleic acid
  modified_base (16)..(16): bicyclic nucleic acid (BNA)
  source: /note="3' tri-ethylene glycol (TEG)"
ggaagauggcauuuct

SEQ ID NO: 20447 - DNA, 15 bp, Artificial Sequence
  source: /note="Description of Artificial Sequence: Synthetic oligonucleotide"
  source: /note="Description of Combined DNA/RNA Molecule: Synthetic oligonucleotide"
  source: /note="DNA/RNA"
  source: /note="5' tri-ethylene glycol (TEG)"
  modified_base (10)..(10): 5-methyl modified nucleotide
  modified_base (14)..(14): bicyclic nucleic acid (BNA)
  modified_base (15)..(15): 5-methyl bicyclic nucleic acid
  source: /note="3' tri-ethylene glycol (TEG)"
ggaagauggcauutc

SEQ ID NO: 20448 - DNA, 14 bp, Artificial Sequence
  source: /note="Description of Artificial Sequence: Synthetic oligonucleotide"
  source: /note="Description of Combined DNA/RNA Molecule: Synthetic oligonucleotide"
  source: /note="DNA/RNA"
  source: /note="5' tri-ethylene glycol (TEG)"
  modified_base (10)..(10): 5-methyl modified nucleotide
  modified_base (13)..(13): bicyclic nucleic acid (BNA)
  modified_base (14)..(14): bicyclic nucleic acid (BNA)
  source: /note="3' tri-ethylene glycol (TEG)"
ggaagauggcautt

SEQ ID NO: 20449 - DNA, 13 bp, Artificial Sequence
  source: /note="Description of Artificial Sequence: Synthetic oligonucleotide"
  source: /note="Description of Combined DNA/RNA Molecule: Synthetic oligonucleotide"
  source: /note="DNA/RNA"
  source: /note="5' tri-ethylene glycol (TEG)"
  modified_base (10)..(10): 5-methyl modified nucleotide
  modified_base (12)..(12): bicyclic nucleic acid (BNA)
  modified_base (13)..(13): bicyclic nucleic acid (BNA)
  source: /note="3' tri-ethylene glycol (TEG)"
ggaagauggcatt

SEQ ID NO: 20450 - DNA, 12 bp, Artificial Sequence
  source: /note="Description of Artificial Sequence: Synthetic oligonucleotide"
  source: /note="Description of Combined DNA/RNA Molecule: Synthetic oligonucleotide"
  source: /note="DNA/RNA"
  source: /note="5' tri-ethylene glycol (TEG)"
  modified_base (10)..(10): 5-methyl modified nucleotide
  modified_base (11)..(11): bicyclic nucleic acid (BNA)
  modified_base (12)..(12): bicyclic nucleic acid (BNA)
  source: /note="3' tri-ethylene glycol (TEG)"
ggaagauggcat

SEQ ID NO: 20451 - RNA, 11 nt, Artificial Sequence
  source: /note="Description of Artificial Sequence: Synthetic oligonucleotide"
  source: /note="RNA"
  source: /note="5' tri-ethylene glycol (TEG)"
  modified_base (10)..(10): 5-methyl bicyclic nucleic acid
  modified_base (11)..(11): bicyclic nucleic acid (BNA)
  source: /note="3' tri-ethylene glycol (TEG)"
ggaagauggca

SEQ ID NO: 20452 - RNA, 10 nt, Artificial Sequence
  source: /note="Description of Artificial Sequence: Synthetic oligonucleotide"
  source: /note="RNA"
  source: /note="5' tri-ethylene glycol (TEG)"
  modified_base (9)..(9): bicyclic nucleic acid (BNA)
  modified_base (10)..(10): 5-methyl bicyclic nucleic acid
  source: /note="3' tri-ethylene glycol (TEG)"
ggaagauggc

SEQ ID NO: 20453 - DNA, 8 bp, Artificial Sequence
  source: /note="Description of Artificial Sequence: Synthetic oligonucleotide"
  source: /note="DNA/RNA"
  source: /note="5' tri-ethylene glycol (TEG)"
  modified_base (7)..(7): bicyclic nucleic acid (BNA)
  modified_base (8)..(8): bicyclic nucleic acid (BNA)
  source: /note="3' tri-ethylene glycol (TEG)"
ggaagatg

SEQ ID NO: 20454 - RNA, 17 nt, Artificial Sequence
  source: /note="Description of Artificial Sequence: Synthetic oligonucleotide"
  source: /note="RNA"
  source: /note="5' tri-ethylene glycol (TEG)"
  modified_base (9)..(9): 5-methyl modified nucleotide
  modified_base (14)..(14): 5-methyl modified nucleotide
  modified_base (16)..(16): bicyclic nucleic acid (BNA)
  modified_base (17)..(17): bicyclic nucleic acid (BNA)
  source: /note="3' tri-ethylene glycol (TEG)"
gaagauggcauuucuag

SEQ ID NO: 20455 - DNA, 16 bp, Artificial Sequence
  source: /note="Description of Artificial Sequence: Synthetic oligonucleotide"
  source: /note="Description of Combined DNA/RNA Molecule: Synthetic oligonucleotide"
  source: /note="DNA/RNA"
  source: /note="5' tri-ethylene glycol (TEG)"
  modified_base (9)..(9): 5-methyl modified nucleotide
  modified_base (14)..(14): 5-methyl modified nucleotide
  modified_base (15)..(15): bicyclic nucleic acid (BNA)
  modified_base (16)..(16): bicyclic nucleic acid (BNA)
  source: /note="3' tri-ethylene glycol (TEG)"
gaagauggcauuucta

SEQ ID NO: 20456 - DNA, 14 bp, Artificial Sequence
  source: /note="Description of Artificial Sequence: Synthetic oligonucleotide"
  source: /note="Description of Combined DNA/RNA Molecule: Synthetic oligonucleotide"
  source: /note="DNA/RNA"
  source: /note="5' tri-ethylene glycol (TEG)"
  modified_base (9)..(9): 5-methyl modified nucleotide
  modified_base (13)..(13): bicyclic nucleic acid (BNA)
  modified_base (14)..(14): 5-methyl bicyclic nucleic acid
  source: /note="3' tri-ethylene glycol (TEG)"
gaagauggcauutc

SEQ ID NO: 20457 - DNA, 13 bp, Artificial Sequence
  source: /note="Description of Artificial Sequence: Synthetic oligonucleotide"
  source: /note="Description of Combined DNA/RNA Molecule: Synthetic oligonucleotide"
  source: /note="DNA/RNA"
  source: /note="5' tri-ethylene glycol (TEG)"
  modified_base (9)..(9): 5-methyl modified nucleotide
  modified_base (12)..(12): bicyclic nucleic acid (BNA)
  modified_base (13)..(13): bicyclic nucleic acid (BNA)
  source: /note="3' tri-ethylene glycol (TEG)"
gaagauggcautt

SEQ ID NO: 20458 - DNA, 12 bp, Artificial Sequence
  source: /note="Description of Artificial Sequence: Synthetic oligonucleotide"
  source: /note="Description of Combined DNA/RNA Molecule: Synthetic oligonucleotide"
  source: /note="DNA/RNA"
  source: /note="5' tri-ethylene glycol (TEG)"
  modified_base (9)..(9): 5-methyl modified nucleotide
  modified_base (11)..(11): bicyclic nucleic acid (BNA)
  modified_base (12)..(12): bicyclic nucleic acid (BNA)
  source: /note="3' tri-ethylene glycol (TEG)"
gaagauggcatt

SEQ ID NO: 20459 - DNA, 11 bp, Artificial Sequence
  source: /note="Description of Artificial Sequence: Synthetic oligonucleotide"
  source: /note="Description of Combined DNA/RNA Molecule: Synthetic oligonucleotide"
  source: /note="DNA/RNA"
  source: /note="5' tri-ethylene glycol (TEG)"
  modified_base (9)..(9): 5-methyl modified nucleotide
  modified_base (10)..(10): bicyclic nucleic acid (BNA)
  modified_base (11)..(11): bicyclic nucleic acid (BNA)
  source: /note="3' tri-ethylene glycol (TEG)"
gaagauggcat

SEQ ID NO: 20460 - RNA, 10 nt, Artificial Sequence
  source: /note="Description of Artificial Sequence: Synthetic oligonucleotide"
  source: /note="RNA"
  source: /note="5' tri-ethylene glycol (TEG)"
  modified_base (9)..(9): 5-methyl bicyclic nucleic acid
  modified_base (10)..(10): bicyclic nucleic acid (BNA)
  source: /note="3' tri-ethylene glycol (TEG)"
gaagauggca

SEQ ID NO: 20461 - RNA, 9 nt, Artificial Sequence
  source: /note="Description of Artificial Sequence: Synthetic oligonucleotide"
  source: /note="RNA"
  source: /note="5' tri-ethylene glycol (TEG)"
  modified_base (8)..(8): bicyclic nucleic acid (BNA)
  modified_base (9)..(9): 5-methyl bicyclic nucleic acid
  source: /note="3' tri-ethylene glycol (TEG)"
gaagauggc

SEQ ID NO: 20462 - RNA, 8 nt, Artificial Sequence
  source: /note="Description of Artificial Sequence: Synthetic oligonucleotide"
  source: /note="RNA"
  source: /note="5' tri-ethylene glycol (TEG)"
  modified_base (7)..(7): bicyclic nucleic acid (BNA)
  modified_base (8)..(8): bicyclic nucleic acid (BNA)
  source: /note="3' tri-ethylene glycol (TEG)"
gaagaugg

SEQ ID NO: 20463 - RNA, 16 nt, Artificial Sequence
  source: /note="Description of Artificial Sequence: Synthetic oligonucleotide"
  source: /note="RNA"
  source: /note="5' tri-ethylene glycol (TEG)"
  modified_base (8)..(8): 5-methyl modified nucleotide
  modified_base (13)..(13): 5-methyl modified nucleotide
  modified_base (15)..(15): bicyclic nucleic acid (BNA)
  modified_base (16)..(16): bicyclic nucleic acid (BNA)
  source: /note="3' tri-ethylene glycol (TEG)"
aagauggcauuucuag

SEQ ID NO: 20464 - DNA, 15 bp, Artificial Sequence
  source: /note="Description of Artificial Sequence: Synthetic oligonucleotide"
  source: /note="Description of Combined DNA/RNA Molecule: Synthetic oligonucleotide"
  source: /note="DNA/RNA"
  source: /note="5' tri-ethylene glycol (TEG)"
  modified_base (8)..(8): 5-methyl modified nucleotide
  modified_base (13)..(13): 5-methyl modified nucleotide
  modified_base (14)..(14): bicyclic nucleic acid (BNA)
  modified_base (15)..(15): bicyclic nucleic acid (BNA)
  source: /note="3' tri-ethylene glycol (TEG)"
aagauggcauuucta

SEQ ID NO: 20465 - DNA, 14 bp, Artificial Sequence
  source: /note="Description of Artificial Sequence: Synthetic oligonucleotide"
  source: /note="Description of Combined DNA/RNA Molecule: Synthetic oligonucleotide"
  source: /note="DNA/RNA"
  source: /note="5' tri-ethylene glycol (TEG)"
  modified_base (8)..(8): 5-methyl modified nucleotide
  modified_base (13)..(13): 5-methyl bicyclic nucleic acid
  modified_base (14)..(14): bicyclic nucleic acid (BNA)
  source: /note="3' tri-ethylene glycol (TEG)"
aagauggcauuuct

SEQ ID NO: 20466 - DNA, 13 bp, Artificial Sequence
  source: /note="Description of Artificial Sequence: Synthetic oligonucleotide"
  source: /note="Description of Combined DNA/RNA Molecule: Synthetic oligonucleotide"
  source: /note="DNA/RNA"
  source: /note="5' tri-ethylene glycol (TEG)"
  modified_base (8)..(8): 5-methyl modified nucleotide
  modified_base (12)..(12): bicyclic nucleic acid (BNA)
  modified_base (13)..(13): 5-methyl bicyclic nucleic acid
  source: /note="3' tri-ethylene glycol (TEG)"
aagauggcauutc

SEQ ID NO: 20467 - DNA, 12 bp, Artificial Sequence
  source: /note="Description of Artificial Sequence: Synthetic oligonucleotide"
  source: /note="Description of Combined DNA/RNA Molecule: Synthetic oligonucleotide"
  source: /note="DNA/RNA"
  source: /note="5' tri-ethylene glycol (TEG)"
  modified_base (8)..(8): 5-methyl modified nucleotide
  modified_base (11)..(11): bicyclic nucleic acid (BNA)
  modified_base (12)..(12): bicyclic nucleic acid (BNA)
  source: /note="3' tri-ethylene glycol (TEG)"
aagauggcautt

SEQ ID NO: 20468 - DNA, 11 bp, Artificial Sequence
  source: /note="Description of Artificial Sequence: Synthetic oligonucleotide"
  source: /note="Description of Combined DNA/RNA Molecule: Synthetic oligonucleotide"
  source: /note="DNA/RNA"
  source: /note="5' tri-ethylene glycol (TEG)"
  modified_base (8)..(8): 5-methyl modified nucleotide
  modified_base (10)..(10): bicyclic nucleic acid (BNA)
  modified_base (11)..(11): bicyclic nucleic acid (BNA)
  source: /note="3' tri-ethylene glycol (TEG)"
aagauggcatt

SEQ ID NO: 20469 - DNA, 10 bp, Artificial Sequence
  source: /note="Description of Artificial Sequence: Synthetic oligonucleotide"
  source: /note="Description of Combined DNA/RNA Molecule: Synthetic oligonucleotide"
  source: /note="DNA/RNA"
  source: /note="5' tri-ethylene glycol (TEG)"
  modified_base (8)..(8): 5-methyl modified nucleotide
  modified_base (9)..(9): bicyclic nucleic acid (BNA)
  modified_base (10)..(10): bicyclic nucleic acid (BNA)
  source: /note="3' tri-ethylene glycol (TEG)"
aagauggcat

SEQ ID NO: 20470 - RNA, 9 nt, Artificial Sequence
  source: /note="Description of Artificial Sequence: Synthetic oligonucleotide"
  source: /note="RNA"
  source: /note="5' tri-ethylene glycol (TEG)"
  modified_base (8)..(8): 5-methyl bicyclic nucleic acid
  modified_base (9)..(9): bicyclic nucleic acid (BNA)
  source: /note="3' tri-ethylene glycol (TEG)"
aagauggca

SEQ ID NO: 20471 - RNA, 8 nt, Artificial Sequence
  source: /note="Description of Artificial Sequence: Synthetic oligonucleotide"
  source: /note="RNA"
  source: /note="5' tri-ethylene glycol (TEG)"
  modified_base (7)..(7): bicyclic nucleic acid (BNA)
  modified_base (8)..(8): 5-methyl bicyclic nucleic acid
  source: /note="3' tri-ethylene glycol (TEG)"
aagauggc

SEQ ID NO: 20472 - RNA, 15 nt, Artificial Sequence
  source: /note="Description of Artificial Sequence: Synthetic oligonucleotide"
  source: /note="RNA"
  source: /note="5' tri-ethylene glycol (TEG)"
  modified_base (7)..(7): 5-methyl modified nucleotide
  modified_base (12)..(12): 5-methyl modified nucleotide
  modified_base (14)..(14): bicyclic nucleic acid (BNA)
  modified_base (15)..(15): bicyclic nucleic acid (BNA)
  source: /note="3' tri-ethylene glycol (TEG)"
agauggcauuucuag

SEQ ID NO: 20473 - DNA, 14 bp, Artificial Sequence
  source: /note="Description of Artificial Sequence: Synthetic oligonucleotide"
  source: /note="Description of Combined DNA/RNA Molecule: Synthetic oligonucleotide"
  source: /note="DNA/RNA"
  source: /note="5' tri-ethylene glycol (TEG)"
  modified_base (7)..(7): 5-methyl modified nucleotide
  modified_base (12)..(12): 5-methyl modified nucleotide
  modified_base (13)..(13): bicyclic nucleic acid (BNA)
  modified_base (14)..(14): bicyclic nucleic acid (BNA)
  source: /note="3' tri-ethylene glycol (TEG)"
agauggcauuucta

SEQ ID NO: 20474 - DNA, 13 bp, Artificial Sequence
  source: /note="Description of Artificial Sequence: Synthetic oligonucleotide"
  source: /note="Description of Combined DNA/RNA Molecule: Synthetic oligonucleotide"
  source: /note="DNA/RNA"
  source: /note="5' tri-ethylene glycol (TEG)"
  modified_base (7)..(7): 5-methyl modified nucleotide
  modified_base (12)..(12): 5-methyl bicyclic nucleic acid
  modified_base (13)..(13): bicyclic nucleic acid (BNA)
  source: /note="3' tri-ethylene glycol (TEG)"
agauggcauuuct

SEQ ID NO: 20475 - DNA, 12 bp, Artificial Sequence
  source: /note="Description of Artificial Sequence: Synthetic oligonucleotide"
  source: /note="Description of Combined DNA/RNA Molecule: Synthetic oligonucleotide"
  source: /note="DNA/RNA"
  source: /note="5' tri-ethylene glycol (TEG)"
  modified_base (7)..(7): 5-methyl modified nucleotide
  modified_base (11)..(11): bicyclic nucleic acid (BNA)
  modified_base (12)..(12): 5-methyl bicyclic nucleic acid
  source: /note="3' tri-ethylene glycol (TEG)"
agauggcauutc

SEQ ID NO: 20476 - DNA, 11 bp, Artificial Sequence
  source: /note="Description of Artificial Sequence: Synthetic oligonucleotide"
  source: /note="Description of Combined DNA/RNA Molecule: Synthetic oligonucleotide"
  source: /note="DNA/RNA"
  source: /note="5' tri-ethylene glycol (TEG)"
  modified_base (7)..(7): 5-methyl modified nucleotide
  modified_base (10)..(10): bicyclic nucleic acid (BNA)
  modified_base (11)..(11): bicyclic nucleic acid (BNA)
  source: /note="3' tri-ethylene glycol (TEG)"
agauggcautt

SEQ ID NO: 20477 - DNA, 10 bp, Artificial Sequence
  source: /note="Description of Artificial Sequence: Synthetic oligonucleotide"
  source: /note="Description of Combined DNA/RNA Molecule: Synthetic oligonucleotide"
  source: /note="DNA/RNA"
  source: /note="5' tri-ethylene glycol (TEG)"
  modified_base (7)..(7): 5-methyl modified nucleotide
  modified_base (9)..(9): bicyclic nucleic acid (BNA)
  modified_base (10)..(10): bicyclic nucleic acid (BNA)
  source: /note="3' tri-ethylene glycol (TEG)"
agauggcatt

SEQ ID NO: 20478 - DNA, 9 bp, Artificial Sequence
  source: /note="Description of Artificial Sequence: Synthetic oligonucleotide"
  source: /note="Description of Combined DNA/RNA Molecule: Synthetic oligonucleotide"
  source: /note="DNA/RNA"
  source: /note="5' tri-ethylene glycol (TEG)"
  modified_base (7)..(7): 5-methyl modified nucleotide
  modified_base (8)..(8): bicyclic nucleic acid (BNA)
  modified_base (9)..(9): bicyclic nucleic acid (BNA)
  source: /note="3' tri-ethylene glycol (TEG)"
agauggcat

SEQ ID NO: 20479 - RNA, 8 nt, Artificial Sequence
  source: /note="Description of Artificial Sequence: Synthetic oligonucleotide"
  source: /note="RNA"
  source: /note="5' tri-ethylene glycol (TEG)"
  modified_base (7)..(7): 5-methyl bicyclic nucleic acid
  modified_base (8)..(8): bicyclic nucleic acid (BNA)
  source: /note="3' tri-ethylene glycol (TEG)"
agauggca

SEQ ID NO: 20480 - RNA, 30 nt, Artificial Sequence; identical to SEQ ID NO: 284
  source: /note="Description of Artificial Sequence: Synthetic oligonucleotide"
  source: /note="RNA"
  source: /note="5' tri-ethylene glycol (TEG)"
  modified_base (1)..(1): 5-methyl modified nucleotide
  modified_base (3)..(3): 5-methyl modified nucleotide
  modified_base (4)..(4): 5-methyl modified nucleotide
  modified_base (7)..(7): 5-methyl modified nucleotide
  modified_base (10)..(10): 5-methyl modified nucleotide
  modified_base (22)..(22): 5-methyl modified nucleotide
  modified_base (27)..(27): 5-methyl modified nucleotide
  modified_base (29)..(29): bicyclic nucleic acid (BNA)
  modified_base (30)..(30): bicyclic nucleic acid (BNA)
  source: /note="3' tri-ethylene glycol (TEG)"

SEQ ID NO: 20481 - DNA, 29 bp, Artificial Sequence
  source: /note="Description of Artificial Sequence: Synthetic oligonucleotide"
  source: /note="Description of Combined DNA/RNA Molecule: Synthetic oligonucleotide"
  source: /note="DNA/RNA"
  source: /note="5' tri-ethylene glycol (TEG)"
  modified_base (1)..(1): 5-methyl modified nucleotide
  modified_base (3)..(3): 5-methyl modified nucleotide
  modified_base (4)..(4): 5-methyl modified nucleotide
  modified_base (7)..(7): 5-methyl modified nucleotide
  modified_base (10)..(10): 5-methyl modified nucleotide
  modified_base (22)..(22): 5-methyl modified nucleotide
  modified_base (27)..(27): 5-methyl modified nucleotide
  modified_base (28)..(28): bicyclic nucleic acid (BNA)
  modified_base (29)..(29): bicyclic nucleic acid (BNA)
  source: /note="3' tri-ethylene glycol (TEG)"
cuccaacaucaaggaagauggcauuucta

SEQ ID NO: 20482 - DNA, 28 bp, Artificial Sequence
  source: /note="Description of Artificial Sequence: Synthetic oligonucleotide"
  source: /note="Description of Combined DNA/RNA Molecule: Synthetic oligonucleotide"
  source: /note="DNA/RNA"
  source: /note="5' tri-ethylene glycol (TEG)"
  modified_base (1)..(1): 5-methyl modified nucleotide
  modified_base (3)..(3): 5-methyl modified nucleotide
  modified_base (4)..(4): 5-methyl modified nucleotide
  modified_base (7)..(7): 5-methyl modified nucleotide
  modified_base (10)..(10): 5-methyl modified nucleotide
  modified_base (22)..(22): 5-methyl modified nucleotide
  modified_base (27)..(27): 5-methyl bicyclic nucleic acid
  modified_base (28)..(28): bicyclic nucleic acid (BNA)
  source: /note="3' tri-ethylene glycol (TEG)"
cuccaacaucaaggaagauggcauuuct

SEQ ID NO: 20483 - DNA, 27 bp, Artificial Sequence
  source: /note="Description of Artificial Sequence: Synthetic oligonucleotide"
  source: /note="Description of Combined DNA/RNA Molecule: Synthetic oligonucleotide"
  source: /note="DNA/RNA"
  source: /note="5' tri-ethylene glycol (TEG)"
  modified_base (1)..(1): 5-methyl modified nucleotide
  modified_base (3)..(3): 5-methyl modified nucleotide
  modified_base (4)..(4): 5-methyl modified nucleotide
  modified_base (7)..(7): 5-methyl modified nucleotide
  modified_base (10)..(10): 5-methyl modified nucleotide
  modified_base (22)..(22): 5-methyl modified nucleotide
  modified_base (26)..(26): bicyclic nucleic acid (BNA)
  modified_base (27)..(27): 5-methyl bicyclic nucleic acid
  source: /note="3' tri-ethylene glycol (TEG)"
cuccaacaucaaggaagauggcauutc

SEQ ID NO: 20484 - DNA, 26 bp, Artificial Sequence
  source: /note="Description of Artificial Sequence: Synthetic oligonucleotide"
  source: /note="Description of Combined DNA/RNA Molecule: Synthetic oligonucleotide"
  source: /note="DNA/RNA"
  source: /note="5' tri-ethylene glycol (TEG)"
  modified_base (1)..(1): 5-methyl modified nucleotide
  modified_base (3)..(3): 5-methyl modified nucleotide
  modified_base (4)..(4): 5-methyl modified nucleotide
  modified_base (7)..(7): 5-methyl modified nucleotide
  modified_base (10)..(10): 5-methyl modified nucleotide
  modified_base (22)..(22): 5-methyl modified nucleotide
  modified_base (25)..(25): bicyclic nucleic acid (BNA)
  modified_base (26)..(26): bicyclic nucleic acid (BNA)
  source: /note="3' tri-ethylene glycol (TEG)"
cuccaacaucaaggaagauggcautt

SEQ ID NO: 20485 - DNA, 25 bp, Artificial Sequence
  source: /note="Description of Artificial Sequence: Synthetic oligonucleotide"
  source: /note="Description of Combined DNA/RNA Molecule: Synthetic oligonucleotide"
  source: /note="DNA/RNA"
  source: /note="5' tri-ethylene glycol (TEG)"
  modified_base (1)..(1): 5-methyl modified nucleotide
  modified_base (3)..(3): 5-methyl modified nucleotide
  modified_base (4)..(4): 5-methyl modified nucleotide
  modified_base (7)..(7): 5-methyl modified nucleotide
  modified_base (10)..(10): 5-methyl modified nucleotide
  modified_base (22)..(22): 5-methyl modified nucleotide
  modified_base (24)..(24): bicyclic nucleic acid (BNA)
  modified_base (25)..(25): bicyclic nucleic acid (BNA)
  source: /note="3' tri-ethylene glycol (TEG)"
cuccaacaucaaggaagauggcatt

SEQ ID NO: 20486 - DNA, 24 bp, Artificial Sequence
  source: /note="Description of Artificial Sequence: Synthetic oligonucleotide"
  source: /note="Description of Combined DNA/RNA Molecule: Synthetic oligonucleotide"
  source: /note="DNA/RNA"
  source: /note="5' tri-ethylene glycol (TEG)"
  modified_base (1)..(1): 5-methyl modified nucleotide
  modified_base (3)..(3): 5-methyl modified nucleotide
  modified_base (4)..(4): 5-methyl modified nucleotide
  modified_base (7)..(7): 5-methyl modified nucleotide
  modified_base (10)..(10): 5-methyl modified nucleotide
  modified_base (22)..(22): 5-methyl modified nucleotide
  modified_base (23)..(23): bicyclic nucleic acid (BNA)
  modified_base (24)..(24): bicyclic nucleic acid (BNA)
  source: /note="3' tri-ethylene glycol (TEG)"
cuccaacaucaaggaagauggcat

SEQ ID NO: 20487 - RNA, 23 nt, Artificial Sequence
  source: /note="Description of Artificial Sequence: Synthetic oligonucleotide"
  source: /note="RNA"
  source: /note="5' tri-ethylene glycol (TEG)"
  modified_base (1)..(1): 5-methyl modified nucleotide
  modified_base (3)..(3): 5-methyl modified nucleotide
  modified_base (4)..(4): 5-methyl modified nucleotide
  modified_base (7)..(7): 5-methyl modified nucleotide
  modified_base (10)..(10): 5-methyl modified nucleotide
  modified_base (22)..(22): 5-methyl bicyclic nucleic acid
  modified_base (23)..(23): bicyclic nucleic acid (BNA)
  source: /note="3' tri-ethylene glycol (TEG)"
cuccaacaucaaggaagauggca

SEQ ID NO: 20488 - RNA, 22 nt, Artificial Sequence
  source: /note="Description of Artificial Sequence: Synthetic oligonucleotide"
  source: /note="RNA"
  source: /note="5' tri-ethylene glycol (TEG)"
  modified_base (1)..(1): 5-methyl modified nucleotide
  modified_base (3)..(3): 5-methyl modified nucleotide
  modified_base (4)..(4): 5-methyl modified nucleotide
  modified_base (7)..(7): 5-methyl modified nucleotide
  modified_base (10)..(10): 5-methyl modified nucleotide
  modified_base (21)..(21): bicyclic nucleic acid (BNA)
  modified_base (22)..(22): 5-methyl bicyclic nucleic acid
  source: /note="3' tri-ethylene glycol (TEG)"
cuccaacaucaaggaagauggc

SEQ ID NO: 20489 - RNA, 21 nt, Artificial Sequence
  source: /note="Description of Artificial Sequence: Synthetic oligonucleotide"
  source: /note="RNA"
  source: /note="5' tri-ethylene glycol (TEG)"
  modified_base (1)..(1): 5-methyl modified nucleotide
  modified_base (3)..(3): 5-methyl modified nucleotide
  modified_base (4)..(4): 5-methyl modified nucleotide
  modified_base (7)..(7): 5-methyl modified nucleotide
  modified_base (10)..(10): 5-methyl modified nucleotide
  modified_base (20)..(20): bicyclic nucleic acid (BNA)
  modified_base (21)..(21): bicyclic nucleic acid (BNA)
  source: /note="3' tri-ethylene glycol (TEG)"
cuccaacaucaaggaagaugg

SEQ ID NO: 20490 - DNA, 20 bp, Artificial Sequence
  source: /note="Description of Artificial Sequence: Synthetic oligonucleotide"
  source: /note="Description of Combined DNA/RNA Molecule: Synthetic oligonucleotide"
  source: /note="DNA/RNA"
  source: /note="5' tri-ethylene glycol (TEG)"
  modified_base (1)..(1): 5-methyl modified nucleotide
  modified_base (3)..(3): 5-methyl modified nucleotide
  modified_base (4)..(4): 5-methyl modified nucleotide
  modified_base (7)..(7): 5-methyl modified nucleotide
  modified_base (10)..(10): 5-methyl modified nucleotide
  modified_base (19)..(19): bicyclic nucleic acid (BNA)
  modified_base (20)..(20): bicyclic nucleic acid (BNA)
  source: /note="3' tri-ethylene glycol (TEG)"
cuccaacaucaaggaagatg

SEQ ID NO: 20491 - DNA, 19 bp, Artificial Sequence
  source: /note="Description of Artificial Sequence: Synthetic oligonucleotide"
  source: /note="Description of Combined DNA/RNA Molecule: Synthetic oligonucleotide"
  source: /note="DNA/RNA"
  source: /note="5' tri-ethylene glycol (TEG)"
  modified_base (1)..(1): 5-methyl modified nucleotide
  modified_base (3)..(3): 5-methyl modified nucleotide
  modified_base (4)..(4): 5-methyl modified nucleotide
  modified_base (7)..(7): 5-methyl modified nucleotide
  modified_base (10)..(10): 5-methyl modified nucleotide
  modified_base (18)..(18): bicyclic nucleic acid (BNA)
  modified_base (19)..(19): bicyclic nucleic acid (BNA)
  source: /note="3' tri-ethylene glycol (TEG)"
cuccaacaucaaggaagat

SEQ ID NO: 20492 - RNA, 18 nt, Artificial Sequence
  source: /note="Description of Artificial Sequence: Synthetic oligonucleotide"
  source: /note="RNA"
  source: /note="5' tri-ethylene glycol (TEG)"
  modified_base (1)..(1): 5-methyl modified nucleotide
  modified_base (3)..(3): 5-methyl modified nucleotide
  modified_base (4)..(4): 5-methyl modified nucleotide
  modified_base (7)..(7): 5-methyl modified nucleotide
  modified_base (10)..(10): 5-methyl modified nucleotide
  modified_base (17)..(17): bicyclic nucleic acid (BNA)
  modified_base (18)..(18): bicyclic nucleic acid (BNA)
  source: /note="3' tri-ethylene glycol (TEG)"
cuccaacaucaaggaaga

SEQ ID NO: 20493 - RNA, 17 nt, Artificial Sequence
  source: /note="Description of Artificial Sequence: Synthetic oligonucleotide"
  source: /note="RNA"
  source: /note="5' tri-ethylene glycol (TEG)"
  modified_base (1)..(1): 5-methyl modified nucleotide
  modified_base (3)..(3): 5-methyl modified nucleotide
  modified_base (4)..(4): 5-methyl modified nucleotide
  modified_base (7)..(7): 5-methyl modified nucleotide
  modified_base (10)..(10): 5-methyl modified nucleotide
  modified_base (16)..(16): bicyclic nucleic acid (BNA)
  modified_base (17)..(17): bicyclic nucleic acid (BNA)
  source: /note="3' tri-ethylene glycol (TEG)"
cuccaacaucaaggaag

SEQ ID NO: 20494 - RNA, 29 nt, Artificial Sequence
  source: /note="Description of Artificial Sequence: Synthetic oligonucleotide"
  source: /note="RNA"
  source: /note="5' tri-ethylene glycol (TEG)"
  modified_base (2)..(2): 5-methyl modified nucleotide
  modified_base (3)..(3): 5-methyl modified nucleotide
  modified_base (6)..(6): 5-methyl modified nucleotide
  modified_base (9)..(9): 5-methyl modified nucleotide
  modified_base (21)..(21): 5-methyl modified nucleotide
  modified_base (26)..(26): 5-methyl modified nucleotide
  modified_base (28)..(28): bicyclic nucleic acid (BNA)
  modified_base (29)..(29): bicyclic nucleic acid (BNA)
  source: /note="3' tri-ethylene glycol (TEG)"
uccaacaucaaggaagauggcauuucuag

SEQ ID NO: 20495 - DNA, 28 bp, Artificial Sequence
  source: /note="Description of Artificial Sequence: Synthetic oligonucleotide"
  source: /note="Description of Combined DNA/RNA Molecule: Synthetic oligonucleotide"
  source: /note="DNA/RNA"
  source: /note="5' tri-ethylene glycol (TEG)"
  modified_base (2)..(2): 5-methyl modified nucleotide
  modified_base (3)..(3): 5-methyl modified nucleotide
  modified_base (6)..(6): 5-methyl modified nucleotide
  modified_base (9)..(9): 5-methyl modified nucleotide
  modified_base (21)..(21): 5-methyl modified nucleotide
  modified_base (26)..(26): 5-methyl modified nucleotide
  modified_base (27)..(27): bicyclic nucleic acid (BNA)
  modified_base (28)..(28): bicyclic nucleic acid (BNA)
  source: /note="3' tri-ethylene glycol (TEG)"
uccaacaucaaggaagauggcauuucta

SEQ ID NO: 20496 - DNA, 27 bp, Artificial Sequence
  source: /note="Description of Artificial Sequence: Synthetic oligonucleotide"
  source: /note="Description of Combined DNA/RNA Molecule: Synthetic oligonucleotide"
  source: /note="DNA/RNA"
  source: /note="5' tri-ethylene glycol (TEG)"
  modified_base (2)..(2): 5-methyl modified nucleotide
  modified_base (3)..(3): 5-methyl modified nucleotide
  modified_base (6)..(6): 5-methyl modified nucleotide
  modified_base (9)..(9): 5-methyl modified nucleotide
  modified_base (21)..(21): 5-methyl modified nucleotide
  modified_base (26)..(26): 5-methyl bicyclic nucleic acid
  modified_base (27)..(27): bicyclic nucleic acid (BNA)
  source: /note="3' tri-ethylene glycol (TEG)"
uccaacaucaaggaagauggcauuuct

SEQ ID NO: 20497 - DNA, 26 bp, Artificial Sequence
  source: /note="Description of Artificial Sequence: Synthetic oligonucleotide"
  source: /note="Description of Combined DNA/RNA Molecule: Synthetic oligonucleotide"
  source: /note="DNA/RNA"
  source: /note="5' tri-ethylene glycol (TEG)"
  modified_base (2)..(2): 5-methyl modified nucleotide
  modified_base (3)..(3): 5-methyl modified nucleotide
  modified_base (6)..(6): 5-methyl modified nucleotide
  modified_base (9)..(9): 5-methyl modified nucleotide
  modified_base (21)..(21): 5-methyl modified nucleotide
  modified_base (25)..(25): bicyclic nucleic acid (BNA)
  modified_base (26)..(26): 5-methyl bicyclic nucleic acid
  source: /note="3' tri-ethylene glycol (TEG)"
uccaacaucaaggaagauggcauutc

SEQ ID NO: 20498 - DNA, 25 bp, Artificial Sequence
  source: /note="Description of Artificial Sequence: Synthetic oligonucleotide"
  source: /note="Description of Combined DNA/RNA Molecule: Synthetic oligonucleotide"
  source: /note="DNA/RNA"
  source: /note="5' tri-ethylene glycol (TEG)"
  modified_base (2)..(2): 5-methyl modified nucleotide
  modified_base (3)..(3): 5-methyl modified nucleotide
  modified_base (6)..(6): 5-methyl modified nucleotide
  modified_base (9)..(9): 5-methyl modified nucleotide
  modified_base (21)..(21): 5-methyl modified nucleotide
  modified_base (24)..(24): bicyclic nucleic acid (BNA)
  modified_base (25)..(25): bicyclic nucleic acid (BNA)
  source: /note="3' tri-ethylene glycol (TEG)"
uccaacaucaaggaagauggcautt

SEQ ID NO: 20499 - DNA, 24 bp, Artificial Sequence
  source: /note="Description of Artificial Sequence: Synthetic oligonucleotide"
  source: /note="Description of Combined DNA/RNA Molecule: Synthetic oligonucleotide"
  source: /note="DNA/RNA"
  source: /note="5' tri-ethylene glycol (TEG)"
  modified_base (2)..(2): 5-methyl modified nucleotide
  modified_base (3)..(3): 5-methyl modified nucleotide
  modified_base (6)..(6): 5-methyl modified nucleotide
  modified_base (9)..(9): 5-methyl modified nucleotide
  modified_base (21)..(21): 5-methyl modified nucleotide
  modified_base (23)..(23): bicyclic nucleic acid (BNA)
  modified_base (24)..(24): bicyclic nucleic acid (BNA)
  source: /note="3' tri-ethylene glycol (TEG)"
uccaacaucaaggaagauggcatt

SEQ ID NO: 20500 - DNA, 23 bp, Artificial Sequence
  source: /note="Description of Artificial Sequence: Synthetic oligonucleotide"
  source: /note="Description of Combined DNA/RNA Molecule: Synthetic oligonucleotide"
  source: /note="DNA/RNA"
  source: /note="5' tri-ethylene glycol (TEG)"
  modified_base (2)..(2): 5-methyl modified nucleotide
  modified_base (3)..(3): 5-methyl modified nucleotide
  modified_base (6)..(6): 5-methyl modified nucleotide
  modified_base (9)..(9): 5-methyl modified nucleotide
  modified_base (21)..(21): 5-methyl modified nucleotide
  modified_base (22)..(22): bicyclic nucleic acid (BNA)
  modified_base (23)..(23): bicyclic nucleic acid (BNA)
  source: /note="3' tri-ethylene glycol (TEG)"
uccaacaucaaggaagauggcat

SEQ ID NO: 20501 - RNA, 22 nt, Artificial Sequence
  source: /note="Description of Artificial Sequence: Synthetic oligonucleotide"
  source: /note="RNA"
  source: /note="5' tri-ethylene glycol (TEG)"
  modified_base (2)..(2): 5-methyl modified nucleotide
  modified_base (3)..(3): 5-methyl modified nucleotide
  modified_base (6)..(6): 5-methyl modified nucleotide
  modified_base (9)..(9): 5-methyl modified nucleotide
  modified_base (21)..(21): 5-methyl bicyclic nucleic acid
  modified_base (22)..(22): bicyclic nucleic acid (BNA)
  source: /note="3' tri-ethylene glycol (TEG)"
uccaacaucaaggaagauggca

SEQ ID NO: 20502 - RNA, 21 nt, Artificial Sequence
  source: /note="Description of Artificial Sequence: Synthetic oligonucleotide"
  source: /note="RNA"
  source: /note="5' tri-ethylene glycol (TEG)"
  modified_base (2)..(2): 5-methyl modified nucleotide
  modified_base (3)..(3): 5-methyl modified nucleotide
  modified_base (6)..(6): 5-methyl modified nucleotide
  modified_base (9)..(9): 5-methyl modified nucleotide
  modified_base (20)..(20): bicyclic nucleic acid (BNA)
  modified_base (21)..(21): 5-methyl bicyclic nucleic acid
  source: /note="3' tri-ethylene glycol (TEG)"
uccaacaucaaggaagauggc

SEQ ID NO: 20503 - RNA, 20 nt, Artificial Sequence
  source: /note="Description of Artificial Sequence: Synthetic oligonucleotide"
  source: /note="RNA"
  source: /note="5' tri-ethylene glycol (TEG)"
  modified_base (2)..(2): 5-methyl modified nucleotide
  modified_base (3)..(3): 5-methyl modified nucleotide
  modified_base (6)..(6): 5-methyl modified nucleotide
  modified_base (9)..(9): 5-methyl modified nucleotide
  modified_base (19)..(19): bicyclic nucleic acid (BNA)
  modified_base (20)..(20): bicyclic nucleic acid (BNA)
  source: /note="3' tri-ethylene glycol (TEG)"
uccaacaucaaggaagaugg

SEQ ID NO: 20504 - DNA, 19 bp, Artificial Sequence
  source: /note="Description of Artificial Sequence: Synthetic oligonucleotide"
  source: /note="Description of Combined DNA/RNA Molecule: Synthetic oligonucleotide"
  source: /note="DNA/RNA"
  source: /note="5' tri-ethylene glycol (TEG)"
  modified_base (2)..(2): 5-methyl modified nucleotide
  modified_base (3)..(3): 5-methyl modified nucleotide
  modified_base (6)..(6): 5-methyl modified nucleotide
  modified_base (9)..(9): 5-methyl modified nucleotide
  modified_base (18)..(18): bicyclic nucleic acid (BNA)
  modified_base (19)..(19): bicyclic nucleic acid (BNA)
  source: /note="3' tri-ethylene glycol (TEG)"
uccaacaucaaggaagatg

SEQ ID NO: 20505 - DNA, 18 bp, Artificial Sequence
  source: /note="Description of Artificial Sequence: Synthetic oligonucleotide"
  source: /note="Description of Combined DNA/RNA Molecule: Synthetic oligonucleotide"
  source: /note="DNA/RNA"
  source: /note="5' tri-ethylene glycol (TEG)"
  modified_base (2)..(2): 5-methyl modified nucleotide
  modified_base (3)..(3): 5-methyl modified nucleotide
  modified_base (6)..(6): 5-methyl modified nucleotide
  modified_base (9)..(9): 5-methyl modified nucleotide
  modified_base (17)..(17): bicyclic nucleic acid (BNA)
  modified_base (18)..(18): bicyclic nucleic acid (BNA)
  source: /note="3' tri-ethylene glycol (TEG)"
uccaacaucaaggaagat

SEQ ID NO: 20506 - RNA, 17 nt, Artificial Sequence
  source: /note="Description of Artificial Sequence: Synthetic oligonucleotide"
  source: /note="RNA"
  source: /note="5' tri-ethylene glycol (TEG)"
  modified_base (2)..(2): 5-methyl modified nucleotide
  modified_base (3)..(3): 5-methyl modified nucleotide
  modified_base (6)..(6): 5-methyl modified nucleotide
  modified_base (9)..(9): 5-methyl modified nucleotide
  modified_base (16)..(16): bicyclic nucleic acid (BNA)
  modified_base (17)..(17): bicyclic nucleic acid (BNA)
  source: /note="3' tri-ethylene glycol (TEG)"
uccaacaucaaggaaga

SEQ ID NO: 20507 - RNA, 16 nt, Artificial Sequence
  source: /note="Description of Artificial Sequence: Synthetic oligonucleotide"
  source: /note="RNA"
  source: /note="5' tri-ethylene glycol (TEG)"
  modified_base (2)..(2): 5-methyl modified nucleotide
  modified_base (3)..(3): 5-methyl modified nucleotide
  modified_base (6)..(6): 5-methyl modified nucleotide
  modified_base (9)..(9): 5-methyl modified nucleotide
  modified_base (15)..(15): bicyclic nucleic acid (BNA)
  modified_base (16)..(16): bicyclic nucleic acid (BNA)
  source: /note="3' tri-ethylene glycol (TEG)"
uccaacaucaaggaag

SEQ ID NO: 20508 - RNA, 28 nt, Artificial Sequence
  source: /note="Description of Artificial Sequence: Synthetic oligonucleotide"
  source: /note="RNA"
  source: /note="5' tri-ethylene glycol (TEG)"
  modified_base (1)..(1): 5-methyl modified nucleotide
  modified_base (2)..(2): 5-methyl modified nucleotide
  modified_base (5)..(5): 5-methyl modified nucleotide
  modified_base (8)..(8): 5-methyl modified nucleotide
  modified_base (20)..(20): 5-methyl modified nucleotide
  modified_base (25)..(25): 5-methyl modified nucleotide
  modified_base (27)..(27): bicyclic nucleic acid (BNA)
  modified_base (28)..(28): bicyclic nucleic acid (BNA)
  source: /note="3' tri-ethylene glycol (TEG)"
ccaacaucaaggaagauggcauuucuag

SEQ ID NO: 20509 - DNA, 27 bp, Artificial Sequence
  source: /note="Description of Artificial Sequence: Synthetic oligonucleotide"
  source: /note="Description of Combined DNA/RNA Molecule: Synthetic oligonucleotide"
  source: /note="DNA/RNA"
  source: /note="5' tri-ethylene glycol (TEG)"
  modified_base (1)..(1): 5-methyl modified nucleotide
  modified_base (2)..(2): 5-methyl modified nucleotide
  modified_base (5)..(5): 5-methyl modified nucleotide
  modified_base (8)..(8): 5-methyl modified nucleotide
  modified_base (20)..(20): 5-methyl modified nucleotide
  modified_base (25)..(25): 5-methyl modified nucleotide
  modified_base (26)..(26): bicyclic nucleic acid (BNA)
  modified_base (27)..(27): bicyclic nucleic acid (BNA)
  source: /note="3' tri-ethylene glycol (TEG)"
ccaacaucaaggaagauggcauuucta

SEQ ID NO: 20510 - DNA, 26 bp, Artificial Sequence
  source: /note="Description of Artificial Sequence: Synthetic oligonucleotide"
  source: /note="Description of Combined DNA/RNA Molecule: Synthetic oligonucleotide"
  source: /note="DNA/RNA"
  source: /note="5' tri-ethylene glycol (TEG)"
  modified_base (1)..(1): 5-methyl modified nucleotide
  modified_base (2)..(2): 5-methyl modified nucleotide
  modified_base (5)..(5): 5-methyl modified nucleotide
  modified_base (8)..(8): 5-methyl modified nucleotide
  modified_base (20)..(20): 5-methyl modified nucleotide
  modified_base (25)..(25): 5-methyl bicyclic nucleic acid
  modified_base (26)..(26): bicyclic nucleic acid (BNA)
  source: /note="3' tri-ethylene glycol (TEG)"
ccaacaucaaggaagauggcauuuct

SEQ ID NO: 20511 - DNA, 25 bp, Artificial Sequence
  source: /note="Description of Artificial Sequence: Synthetic oligonucleotide"
  source: /note="Description of Combined DNA/RNA Molecule: Synthetic oligonucleotide"
  source: /note="DNA/RNA"
  source: /note="5' tri-ethylene glycol (TEG)"
  modified_base (1)..(1): 5-methyl modified nucleotide
  modified_base (2)..(2): 5-methyl modified nucleotide
  modified_base (5)..(5): 5-methyl modified nucleotide
  modified_base (8)..(8): 5-methyl modified nucleotide
  modified_base (20)..(20): 5-methyl modified nucleotide
  modified_base (24)..(24): bicyclic nucleic acid (BNA)
  modified_base (25)..(25): 5-methyl bicyclic nucleic acid
  source: /note="3' tri-ethylene glycol (TEG)"
ccaacaucaaggaagauggcauutc

SEQ ID NO: 20512 - DNA, 24 bp, Artificial Sequence
  source: /note="Description of Artificial Sequence: Synthetic oligonucleotide"
  source: /note="Description of Combined DNA/RNA Molecule: Synthetic oligonucleotide"
  source: /note="DNA/RNA"
  source: /note="5' tri-ethylene glycol (TEG)"
  modified_base (1)..(1): 5-methyl modified nucleotide
  modified_base (2)..(2): 5-methyl modified nucleotide
  modified_base (5)..(5): 5-methyl modified nucleotide
  modified_base (8)..(8): 5-methyl modified nucleotide
  modified_base (20)..(20): 5-methyl modified nucleotide
  modified_base (23)..(23): bicyclic nucleic acid (BNA)
  modified_base (24)..(24): bicyclic nucleic acid (BNA)
  source: /note="3' tri-ethylene glycol (TEG)"
ccaacaucaaggaagauggcautt

SEQ ID NO: 20513 - DNA, 23 bp, Artificial Sequence
  source: /note="Description of Artificial Sequence: Synthetic oligonucleotide"
  source: /note="Description of Combined DNA/RNA Molecule: Synthetic oligonucleotide"
  source: /note="DNA/RNA"
  source: /note="5' tri-ethylene glycol (TEG)"
  modified_base (1)..(1): 5-methyl modified nucleotide
  modified_base (2)..(2): 5-methyl modified nucleotide
  modified_base (5)..(5): 5-methyl modified nucleotide
  modified_base (8)..(8): 5-methyl modified nucleotide
  modified_base (20)..(20): 5-methyl modified nucleotide
  modified_base (22)..(22): bicyclic nucleic acid (BNA)
  modified_base (23)..(23): bicyclic nucleic acid (BNA)
  source: /note="3' tri-ethylene glycol (TEG)"
ccaacaucaaggaagauggcatt

SEQ ID NO: 20514 - DNA, 22 bp, Artificial Sequence
  source: /note="Description of Artificial Sequence: Synthetic oligonucleotide"
  source: /note="Description of Combined DNA/RNA Molecule: Synthetic oligonucleotide"
  source: /note="DNA/RNA"
  source: /note="5' tri-ethylene glycol (TEG)"
  modified_base (1)..(1): 5-methyl modified nucleotide
  modified_base (2)..(2): 5-methyl modified nucleotide
  modified_base (5)..(5): 5-methyl modified nucleotide
  modified_base (8)..(8): 5-methyl modified nucleotide
  modified_base (20)..(20): 5-methyl modified nucleotide
  modified_base (21)..(21): bicyclic nucleic acid (BNA)
  modified_base (22)..(22): bicyclic nucleic acid (BNA)
  source: /note="3' tri-ethylene glycol (TEG)"
ccaacaucaaggaagauggcat

SEQ ID NO: 20515 - RNA, 21 nt, Artificial Sequence
  source: /note="Description of Artificial Sequence: Synthetic oligonucleotide"
  source: /note="RNA"
  source: /note="5' tri-ethylene glycol (TEG)"
  modified_base (1)..(1): 5-methyl modified nucleotide
  modified_base (2)..(2): 5-methyl modified nucleotide
  modified_base (5)..(5): 5-methyl modified nucleotide
  modified_base (8)..(8): 5-methyl modified nucleotide
  modified_base (20)..(20): 5-methyl bicyclic nucleic acid
  modified_base (21)..(21): bicyclic nucleic acid (BNA)
  source: /note="3' tri-ethylene glycol (TEG)"
ccaacaucaaggaagauggca

SEQ ID NO: 20516 - RNA, 20 nt, Artificial Sequence
  source: /note="Description of Artificial Sequence: Synthetic oligonucleotide"
  source: /note="RNA"
  source: /note="5' tri-ethylene glycol (TEG)"
  modified_base (1)..(1): 5-methyl modified nucleotide
  modified_base (2)..(2): 5-methyl modified nucleotide
  modified_base (5)..(5): 5-methyl modified nucleotide
  modified_base (8)..(8): 5-methyl modified nucleotide
  modified_base (19)..(19): bicyclic nucleic acid (BNA)
  modified_base (20)..(20): 5-methyl bicyclic nucleic acid
  source: /note="3' tri-ethylene glycol (TEG)"
ccaacaucaaggaagauggc

SEQ ID NO: 20517 - RNA, 19 nt, Artificial Sequence
  source: /note="Description of Artificial Sequence: Synthetic oligonucleotide"
  source: /note="RNA"
  source: /note="5' tri-ethylene glycol (TEG)"
  modified_base (1)..(1): 5-methyl modified nucleotide
  modified_base (2)..(2): 5-methyl modified nucleotide
  modified_base (5)..(5): 5-methyl modified nucleotide
  modified_base (8)..(8): 5-methyl modified nucleotide
  modified_base (18)..(18): bicyclic nucleic acid (BNA)
  modified_base (19)..(19): bicyclic nucleic acid (BNA)
  source: /note="3' tri-ethylene glycol (TEG)"
ccaacaucaaggaagaugg

SEQ ID NO: 20518 - DNA, 18 bp, Artificial Sequence
  source: /note="Description of Artificial Sequence: Synthetic oligonucleotide"
  source: /note="Description of Combined DNA/RNA Molecule: Synthetic oligonucleotide"
  source: /note="DNA/RNA"
  source: /note="5' tri-ethylene glycol (TEG)"
  modified_base (1)..(1): 5-methyl modified nucleotide
  modified_base (2)..(2): 5-methyl modified nucleotide
  modified_base (5)..(5): 5-methyl modified nucleotide
  modified_base (8)..(8): 5-methyl modified nucleotide
  modified_base (17)..(17): bicyclic nucleic acid (BNA)
  modified_base (18)..(18): bicyclic nucleic acid (BNA)
  source: /note="3' tri-ethylene glycol (TEG)"
ccaacaucaaggaagatg

SEQ ID NO: 20519 - DNA, 17 bp, Artificial Sequence
  source: /note="Description of Artificial Sequence: Synthetic oligonucleotide"
  source: /note="Description of Combined DNA/RNA Molecule: Synthetic oligonucleotide"
  source: /note="DNA/RNA"
  source: /note="5' tri-ethylene glycol (TEG)"
  modified_base (1)..(1): 5-methyl modified nucleotide
  modified_base (2)..(2): 5-methyl modified nucleotide
  modified_base (5)..(5): 5-methyl modified nucleotide
  modified_base (8)..(8): 5-methyl modified nucleotide
  modified_base (16)..(16): bicyclic nucleic acid (BNA)
  modified_base (17)..(17): bicyclic nucleic acid (BNA)
  source: /note="3' tri-ethylene glycol (TEG)"
ccaacaucaaggaagat

SEQ ID NO: 20520 - RNA, 16 nt, Artificial Sequence
  source: /note="Description of Artificial Sequence: Synthetic oligonucleotide"
  source: /note="RNA"
  source: /note="5' tri-ethylene glycol (TEG)"
  modified_base (1)..(1): 5-methyl modified nucleotide
  modified_base (2)..(2): 5-methyl modified nucleotide
  modified_base (5)..(5): 5-methyl modified nucleotide
  modified_base (8)..(8): 5-methyl modified nucleotide
  modified_base (15)..(15): bicyclic nucleic acid (BNA)
  modified_base (16)..(16): bicyclic nucleic acid (BNA)
  source: /note="3' tri-ethylene glycol (TEG)"
ccaacaucaaggaaga

SEQ ID NO: 20521 - RNA, 15 nt, Artificial Sequence
  source: /note="Description of Artificial Sequence: Synthetic oligonucleotide"
  source: /note="RNA"
  source: /note="5' tri-ethylene glycol (TEG)"
  modified_base (1)..(1): 5-methyl modified nucleotide
  modified_base (2)..(2): 5-methyl modified nucleotide
  modified_base (5)..(5): 5-methyl modified nucleotide
  modified_base (8)..(8): 5-methyl modified nucleotide
  modified_base (14)..(14): bicyclic nucleic acid (BNA)
  modified_base (15)..(15): bicyclic nucleic acid (BNA)
  source: /note="3' tri-ethylene glycol (TEG)"
ccaacaucaaggaag

SEQ ID NO: 20522 - RNA, 27 nt, Artificial Sequence
  source: /note="Description of Artificial Sequence: Synthetic oligonucleotide"
  source: /note="RNA"
  source: /note="5' tri-ethylene glycol (TEG)"
  modified_base (1)..(1): 5-methyl modified nucleotide
  modified_base (4)..(4): 5-methyl modified nucleotide
  modified_base (7)..(7): 5-methyl modified nucleotide
  modified_base (19)..(19): 5-methyl modified nucleotide
  modified_base (24)..(24): 5-methyl modified nucleotide
  modified_base (26)..(26): bicyclic nucleic acid (BNA)
  modified_base (27)..(27): bicyclic nucleic acid (BNA)
  source: /note="3' tri-ethylene glycol (TEG)"
caacaucaaggaagauggcauuucuag

SEQ ID NO: 20523 - DNA, 26 bp, Artificial Sequence
  source: /note="Description of Artificial Sequence: Synthetic oligonucleotide"
  source: /note="Description of Combined DNA/RNA Molecule: Synthetic oligonucleotide"
  source: /note="DNA/RNA"
  source: /note="5' tri-ethylene glycol (TEG)"
  modified_base (1)..(1): 5-methyl modified nucleotide
  modified_base (4)..(4): 5-methyl modified nucleotide
  modified_base (7)..(7): 5-methyl modified nucleotide
  modified_base (19)..(19): 5-methyl modified nucleotide
  modified_base (24)..(24): 5-methyl modified nucleotide
  modified_base (25)..(25): bicyclic nucleic acid (BNA)
  modified_base (26)..(26): bicyclic nucleic acid (BNA)
  source: /note="3' tri-ethylene glycol (TEG)"
caacaucaaggaagauggcauuucta

SEQ ID NO: 20524 - DNA, 25 bp, Artificial Sequence
  source: /note="Description of Artificial Sequence: Synthetic oligonucleotide"
  source: /note="Description of Combined DNA/RNA Molecule: Synthetic oligonucleotide"
  source: /note="DNA/RNA"
  source: /note="5' tri-ethylene glycol (TEG)"
  modified_base (1)..(1): 5-methyl modified nucleotide
  modified_base (4)..(4): 5-methyl modified nucleotide
  modified_base (7)..(7): 5-methyl modified nucleotide
  modified_base (19)..(19): 5-methyl modified nucleotide
  modified_base (24)..(24): 5-methyl bicyclic nucleic acid
  modified_base (25)..(25): bicyclic nucleic acid (BNA)
  source: /note="3' tri-ethylene glycol (TEG)"
caacaucaaggaagauggcauuuct

SEQ ID NO: 20525 - DNA, 24 bp, Artificial Sequence
  source: /note="Description of Artificial Sequence: Synthetic oligonucleotide"
  source: /note="Description of Combined DNA/RNA Molecule: Synthetic oligonucleotide"
  source: /note="DNA/RNA"
  source: /note="5' tri-ethylene glycol (TEG)"
  modified_base (1)..(1): 5-methyl modified nucleotide
  modified_base (4)..(4): 5-methyl modified nucleotide
  modified_base (7)..(7): 5-methyl modified nucleotide
  modified_base (19)..(19): 5-methyl modified nucleotide
  modified_base (23)..(23): bicyclic nucleic acid (BNA)
  modified_base (24)..(24): 5-methyl bicyclic nucleic acid
  source: /note="3' tri-ethylene glycol (TEG)"
caacaucaaggaagauggcauutc

SEQ ID NO: 20526 - DNA, 23 bp, Artificial Sequence
  source: /note="Description of Artificial Sequence: Synthetic oligonucleotide"
  source: /note="Description of Combined DNA/RNA Molecule: Synthetic oligonucleotide"
  source: /note="DNA/RNA"
  source: /note="5' tri-ethylene glycol (TEG)"
  modified_base (1)..(1): 5-methyl modified nucleotide
  modified_base (4)..(4): 5-methyl modified nucleotide
  modified_base (7)..(7): 5-methyl modified nucleotide
  modified_base (19)..(19): 5-methyl modified nucleotide
  modified_base (22)..(22): bicyclic nucleic acid (BNA)
  modified_base (23)..(23): bicyclic nucleic acid (BNA)
  source: /note="3' tri-ethylene glycol (TEG)"
caacaucaaggaagauggcautt

SEQ ID NO: 20527 - DNA, 22 bp, Artificial Sequence
  source: /note="Description of Artificial Sequence: Synthetic oligonucleotide"
  source: /note="Description of Combined DNA/RNA Molecule: Synthetic oligonucleotide"
  source: /note="DNA/RNA"
  source: /note="5' tri-ethylene glycol (TEG)"
  modified_base (1)..(1): 5-methyl modified nucleotide
  modified_base (4)..(4): 5-methyl modified nucleotide
  modified_base (7)..(7): 5-methyl modified nucleotide
  modified_base (19)..(19): 5-methyl modified nucleotide
  modified_base (21)..(21): bicyclic nucleic acid (BNA)
  modified_base (22)..(22): bicyclic nucleic acid (BNA)
  source: /note="3' tri-ethylene glycol (TEG)"
caacaucaaggaagauggcatt

SEQ ID NO: 20528 - DNA, 21 bp, Artificial Sequence
  source: /note="Description of Artificial Sequence: Synthetic oligonucleotide"
  source: /note="Description of Combined DNA/RNA Molecule: Synthetic oligonucleotide"
  source: /note="DNA/RNA"
  source: /note="5' tri-ethylene glycol (TEG)"
  modified_base (1)..(1): 5-methyl modified nucleotide
  modified_base (4)..(4): 5-methyl modified nucleotide
  modified_base (7)..(7): 5-methyl modified nucleotide
  modified_base (19)..(19): 5-methyl modified nucleotide
  modified_base (20)..(20): bicyclic nucleic acid (BNA)
  modified_base (21)..(21): bicyclic nucleic acid (BNA)
  source: /note="3' tri-ethylene glycol (TEG)"
caacaucaaggaagauggcat

SEQ ID NO: 20529 - RNA, 20 nt, Artificial Sequence
  source: /note="Description of Artificial Sequence: Synthetic oligonucleotide"
  source: /note="RNA"
  source: /note="5' tri-ethylene glycol (TEG)"
  modified_base (1)..(1): 5-methyl modified nucleotide
  modified_base (4)..(4): 5-methyl modified nucleotide
  modified_base (7)..(7): 5-methyl modified nucleotide
  modified_base (19)..(19): 5-methyl bicyclic nucleic acid
  modified_base (20)..(20): bicyclic nucleic acid (BNA)
  source: /note="3' tri-ethylene glycol (TEG)"
caacaucaaggaagauggca

SEQ ID NO: 20530 - RNA, 19 nt, Artificial Sequence
  source: /note="Description of Artificial Sequence: Synthetic oligonucleotide"
  source: /note="RNA"
  source: /note="5' tri-ethylene glycol (TEG)"
  modified_base (1)..(1): 5-methyl modified nucleotide
  modified_base (4)..(4): 5-methyl modified nucleotide
  modified_base (7)..(7): 5-methyl modified nucleotide
  modified_base (18)..(18): bicyclic nucleic acid (BNA)
  modified_base (19)..(19): 5-methyl bicyclic nucleic acid
  source: /note="3' tri-ethylene glycol (TEG)"
caacaucaaggaagauggc

SEQ ID NO: 20531 - RNA, 18 nt, Artificial Sequence
  source: /note="Description of Artificial Sequence: Synthetic oligonucleotide"
  source: /note="RNA"
  source: /note="5' tri-ethylene glycol (TEG)"
  modified_base (1)..(1): 5-methyl modified nucleotide
  modified_base (4)..(4): 5-methyl modified nucleotide
  modified_base (7)..(7): 5-methyl modified nucleotide
  modified_base (17)..(17): bicyclic nucleic acid (BNA)
  modified_base (18)..(18): bicyclic nucleic acid (BNA)
  source: /note="3' tri-ethylene glycol (TEG)"
caacaucaaggaagaugg

SEQ ID NO: 20532 - DNA, 17 bp, Artificial Sequence
  source: /note="Description of Artificial Sequence: Synthetic oligonucleotide"
  source: /note="Description of Combined DNA/RNA Molecule: Synthetic oligonucleotide"
  source: /note="DNA/RNA"
  source: /note="5' tri-ethylene glycol (TEG)"
  modified_base (1)..(1): 5-methyl modified nucleotide
  modified_base (4)..(4): 5-methyl modified nucleotide
  modified_base (7)..(7): 5-methyl modified nucleotide
  modified_base (16)..(16): bicyclic nucleic acid (BNA)
  modified_base (17)..(17): bicyclic nucleic acid (BNA)
  source: /note="3' tri-ethylene glycol (TEG)"
caacaucaaggaagatg

SEQ ID NO: 20533 - DNA, 16 bp, Artificial Sequence
  source: /note="Description of Artificial Sequence: Synthetic oligonucleotide"
  source: /note="Description of Combined DNA/RNA Molecule: Synthetic oligonucleotide"
  source: /note="DNA/RNA"
  source: /note="5' tri-ethylene glycol (TEG)"
  modified_base (1)..(1): 5-methyl modified nucleotide
  modified_base (4)..(4): 5-methyl modified nucleotide
  modified_base (7)..(7): 5-methyl modified nucleotide
  modified_base (15)..(15): bicyclic nucleic acid (BNA)
  modified_base (16)..(16): bicyclic nucleic acid (BNA)
  source: /note="3' tri-ethylene glycol (TEG)"
caacaucaaggaagat

SEQ ID NO: 20534 - RNA, 15 nt, Artificial Sequence
  source: /note="Description of Artificial Sequence: Synthetic oligonucleotide"
  source: /note="RNA"
  source: /note="5' tri-ethylene glycol (TEG)"
  modified_base (1)..(1): 5-methyl modified nucleotide
  modified_base (4)..(4): 5-methyl modified nucleotide
  modified_base (7)..(7): 5-methyl modified nucleotide
  modified_base (14)..(14): bicyclic nucleic acid (BNA)
  modified_base (15)..(15): bicyclic nucleic acid (BNA)
  source: /note="3' tri-ethylene glycol (TEG)"
caacaucaaggaaga

SEQ ID NO: 20535 - RNA, 14 nt, Artificial Sequence
  source: /note="Description of Artificial Sequence: Synthetic oligonucleotide"
  source: /note="RNA"
  source: /note="5' tri-ethylene glycol (TEG)"
  modified_base (1)..(1): 5-methyl modified nucleotide
  modified_base (4)..(4): 5-methyl modified nucleotide
  modified_base (7)..(7): 5-methyl modified nucleotide
  modified_base (13)..(13): bicyclic nucleic acid (BNA)
  modified_base (14)..(14): bicyclic nucleic acid (BNA)
  source: /note="3' tri-ethylene glycol (TEG)"
caacaucaaggaag

SEQ ID NO: 20536 - RNA, 26 nt, Artificial Sequence
  source: /note="Description of Artificial Sequence: Synthetic oligonucleotide"
  source: /note="RNA"
  source: /note="5' tri-ethylene glycol (TEG)"
  modified_base (3)..(3): 5-methyl modified nucleotide
  modified_base (6)..(6): 5-methyl modified nucleotide
  modified_base (18)..(18): 5-methyl modified nucleotide
  modified_base (23)..(23): 5-methyl modified nucleotide
  modified_base (25)..(25): bicyclic nucleic acid (BNA)
  modified_base (26)..(26): bicyclic nucleic acid (BNA)
  source: /note="3' tri-ethylene glycol (TEG)"
aacaucaaggaagauggcauuucuag

SEQ ID NO: 20537 - DNA, 25 bp, Artificial Sequence
  source: /note="Description of Artificial Sequence: Synthetic oligonucleotide"
  source: /note="Description of Combined DNA/RNA Molecule: Synthetic oligonucleotide"
  source: /note="DNA/RNA"
  source: /note="5' tri-ethylene glycol (TEG)"
  modified_base (3)..(3): 5-methyl modified nucleotide
  modified_base (6)..(6): 5-methyl modified nucleotide
  modified_base (18)..(18): 5-methyl modified nucleotide
  modified_base (23)..(23): 5-methyl modified nucleotide
  modified_base (24)..(24): bicyclic nucleic acid (BNA)
  modified_base (25)..(25): bicyclic nucleic acid (BNA)
  source: /note="3' tri-ethylene glycol (TEG)"
aacaucaaggaagauggcauuucta

SEQ ID NO: 20538 - DNA, 24 bp, Artificial Sequence
  source: /note="Description of Artificial Sequence: Synthetic oligonucleotide"
  source: /note="Description of Combined DNA/RNA Molecule: Synthetic oligonucleotide"
  source: /note="DNA/RNA"
  source: /note="5' tri-ethylene glycol (TEG)"
  modified_base (3)..(3): 5-methyl modified nucleotide
  modified_base (6)..(6): 5-methyl modified nucleotide
  modified_base (18)..(18): 5-methyl modified nucleotide
  modified_base (23)..(23): 5-methyl bicyclic nucleic acid
  modified_base (24)..(24): bicyclic nucleic acid (BNA)
  source: /note="3' tri-ethylene glycol (TEG)"
aacaucaaggaagauggcauuuct

SEQ ID NO: 20539 - DNA, 23 bp, Artificial Sequence
  source: /note="Description of Artificial Sequence: Synthetic oligonucleotide"
  source: /note="Description of Combined DNA/RNA Molecule: Synthetic oligonucleotide"
  source: /note="DNA/RNA"
  source: /note="5' tri-ethylene glycol (TEG)"
  modified_base (3)..(3): 5-methyl modified nucleotide
  modified_base (6)..(6): 5-methyl modified nucleotide
  modified_base (18)..(18): 5-methyl modified nucleotide
  modified_base (22)..(22): bicyclic nucleic acid (BNA)
  modified_base (23)..(23): 5-methyl bicyclic nucleic acid
  source: /note="3' tri-ethylene glycol (TEG)"
aacaucaaggaagauggcauutc

SEQ ID NO: 20540 - DNA, 22 bp, Artificial Sequence
  source: /note="Description of Artificial Sequence: Synthetic oligonucleotide"
  source: /note="Description of Combined DNA/RNA Molecule: Synthetic oligonucleotide"
  source: /note="DNA/RNA"
  source: /note="5' tri-ethylene glycol (TEG)"
  modified_base (3)..(3): 5-methyl modified nucleotide
  modified_base (6)..(6): 5-methyl modified nucleotide
  modified_base (18)..(18): 5-methyl modified nucleotide
  modified_base (21)..(21): bicyclic nucleic acid (BNA)
  modified_base (22)..(22): bicyclic nucleic acid (BNA)
  source: /note="3' tri-ethylene glycol (TEG)"
aacaucaaggaagauggcautt

SEQ ID NO: 20541 - DNA, 21 bp, Artificial Sequence
  source: /note="Description of Artificial Sequence: Synthetic oligonucleotide"
  source: /note="Description of Combined DNA/RNA Molecule: Synthetic oligonucleotide"
  source: /note="DNA/RNA"
  source: /note="5' tri-ethylene glycol (TEG)"
  modified_base (3)..(3): 5-methyl modified nucleotide
  modified_base (6)..(6): 5-methyl modified nucleotide
  modified_base (18)..(18): 5-methyl modified nucleotide
  modified_base (20)..(20): bicyclic nucleic acid (BNA)
  modified_base (21)..(21): bicyclic nucleic acid (BNA)
  source: /note="3' tri-ethylene glycol (TEG)"
aacaucaaggaagauggcatt

SEQ ID NO: 20542 - DNA, 20 bp, Artificial Sequence
  source: /note="Description of Artificial Sequence: Synthetic oligonucleotide"
  source: /note="Description of Combined DNA/RNA Molecule: Synthetic oligonucleotide"
  source: /note="DNA/RNA"
  source: /note="5' tri-ethylene glycol (TEG)"
  modified_base (3)..(3): 5-methyl modified nucleotide
  modified_base (6)..(6): 5-methyl modified nucleotide
  modified_base (18)..(18): 5-methyl modified nucleotide
  modified_base (19)..(19): bicyclic nucleic acid (BNA)
  modified_base (20)..(20): bicyclic nucleic acid (BNA)
  source: /note="3' tri-ethylene glycol (TEG)"
aacaucaaggaagauggcat

SEQ ID NO: 20543 - RNA, 19 nt, Artificial Sequence
  source: /note="Description of Artificial Sequence: Synthetic oligonucleotide"
  source: /note="RNA"
  source: /note="5' tri-ethylene glycol (TEG)"
  modified_base (3)..(3): 5-methyl modified nucleotide
  modified_base (6)..(6): 5-methyl modified nucleotide
  modified_base (18)..(18): 5-methyl bicyclic nucleic acid
  modified_base (19)..(19): bicyclic nucleic acid (BNA)
  source: /note="3' tri-ethylene glycol (TEG)"
aacaucaaggaagauggca

SEQ ID NO: 20544 - RNA, 18 nt, Artificial Sequence
  source: /note="Description of Artificial Sequence: Synthetic oligonucleotide"
  source: /note="RNA"
  source: /note="5' tri-ethylene glycol (TEG)"
  modified_base (3)..(3): 5-methyl modified nucleotide
  modified_base (6)..(6): 5-methyl modified nucleotide
  modified_base (17)..(17): bicyclic nucleic acid (BNA)
  modified_base (18)..(18): 5-methyl bicyclic nucleic acid
  source: /note="3' tri-ethylene glycol (TEG)"
aacaucaaggaagauggc

SEQ ID NO: 20545 - RNA, 17 nt, Artificial Sequence
  source: /note="Description of Artificial Sequence: Synthetic oligonucleotide"
  source: /note="RNA"
  source: /note="5' tri-ethylene glycol (TEG)"
  modified_base (3)..(3): 5-methyl modified nucleotide
  modified_base (6)..(6): 5-methyl modified nucleotide
  modified_base (16)..(16): bicyclic nucleic acid (BNA)
  modified_base (17)..(17): bicyclic nucleic acid (BNA)
  source: /note="3' tri-ethylene glycol (TEG)"
aacaucaaggaagaugg

SEQ ID NO: 20546 - DNA, 16 bp, Artificial Sequence
  source: /note="Description of Artificial Sequence: Synthetic oligonucleotide"
  source: /note="Description of Combined DNA/RNA Molecule: Synthetic oligonucleotide"
  source: /note="DNA/RNA"
  source: /note="5' tri-ethylene glycol (TEG)"
  modified_base (3)..(3): 5-methyl modified nucleotide
  modified_base (6)..(6): 5-methyl modified nucleotide
  modified_base (15)..(15): bicyclic nucleic acid (BNA)
  modified_base (16)..(16): bicyclic nucleic acid (BNA)
  source: /note="3' tri-ethylene glycol (TEG)"
aacaucaaggaagatg

SEQ ID NO: 20547 - DNA, 15 bp, Artificial Sequence
  source: /note="Description of Artificial Sequence: Synthetic oligonucleotide"
  source: /note="Description of Combined DNA/RNA Molecule: Synthetic oligonucleotide"
  source: /note="DNA/RNA"
  source: /note="5' tri-ethylene glycol (TEG)"
  modified_base (3)..(3): 5-methyl modified nucleotide
  modified_base (6)..(6): 5-methyl modified nucleotide
  modified_base (14)..(14): bicyclic nucleic acid (BNA)
  modified_base (15)..(15): bicyclic nucleic acid (BNA)
  source: /note="3' tri-ethylene glycol (TEG)"
aacaucaaggaagat

SEQ ID NO: 20548 - RNA, 14 nt, Artificial Sequence
  source: /note="Description of Artificial Sequence: Synthetic oligonucleotide"
  source: /note="RNA"
  source: /note="5' tri-ethylene glycol (TEG)"
  modified_base (3)..(3): 5-methyl modified nucleotide
  modified_base (6)..(6): 5-methyl modified nucleotide
  modified_base (13)..(13): bicyclic nucleic acid (BNA)
  modified_base (14)..(14): bicyclic nucleic acid (BNA)
  source: /note="3' tri-ethylene glycol (TEG)"
aacaucaaggaaga

SEQ ID NO: 20549 - RNA, 13 nt, Artificial Sequence
  source: /note="Description of Artificial Sequence: Synthetic oligonucleotide"
  source: /note="RNA"
  source: /note="5' tri-ethylene glycol (TEG)"
  modified_base (3)..(3): 5-methyl modified nucleotide
  modified_base (6)..(6): 5-methyl modified nucleotide
  modified_base (12)..(12): bicyclic nucleic acid (BNA)
  modified_base (13)..(13): bicyclic nucleic acid (BNA)
  source: /note="3' tri-ethylene glycol (TEG)"
aacaucaaggaag

SEQ ID NO: 20550 - RNA, 25 nt, Artificial Sequence
  source: /note="Description of Artificial Sequence: Synthetic oligonucleotide"
  source: /note="RNA"
  source: /note="5' tri-ethylene glycol (TEG)"
  modified_base (2)..(2): 5-methyl modified nucleotide
  modified_base (5)..(5): 5-methyl modified nucleotide
  modified_base (17)..(17): 5-methyl modified nucleotide
  modified_base (22)..(22): 5-methyl modified nucleotide
  modified_base (24)..(24): bicyclic nucleic acid (BNA)
  modified_base (25)..(25): bicyclic nucleic acid (BNA)
  source: /note="3' tri-ethylene glycol (TEG)"
acaucaaggaagauggcauuucuag

SEQ ID NO: 20551 - DNA, 24 bp, Artificial Sequence
  source: /note="Description of Artificial Sequence: Synthetic oligonucleotide"
  source: /note="Description of Combined DNA/RNA Molecule: Synthetic oligonucleotide"
  source: /note="DNA/RNA"
  source: /note="5' tri-ethylene glycol (TEG)"
  modified_base (2)..(2): 5-methyl modified nucleotide
  modified_base (5)..(5): 5-methyl modified nucleotide
  modified_base (17)..(17): 5-methyl modified nucleotide
  modified_base (22)..(22): 5-methyl modified nucleotide
  modified_base (23)..(23): bicyclic nucleic acid (BNA)
  modified_base (24)..(24): bicyclic nucleic acid (BNA)
  source: /note="3' tri-ethylene glycol (TEG)"
acaucaaggaagauggcauuucta

SEQ ID NO: 20552 - DNA, 23 bp, Artificial Sequence
  source: /note="Description of Artificial Sequence: Synthetic oligonucleotide"
  source: /note="Description of Combined DNA/RNA Molecule: Synthetic oligonucleotide"
  source: /note="DNA/RNA"
  source: /note="5' tri-ethylene glycol (TEG)"
  modified_base (2)..(2): 5-methyl modified nucleotide
  modified_base (5)..(5): 5-methyl modified nucleotide
  modified_base (17)..(17): 5-methyl modified nucleotide
  modified_base (22)..(22): 5-methyl bicyclic nucleic acid
  modified_base (23)..(23): bicyclic nucleic acid (BNA)
  source: /note="3' tri-ethylene glycol (TEG)"
acaucaaggaagauggcauuuct

SEQ ID NO: 20553 - DNA, 22 bp, Artificial Sequence
  source: /note="Description of Artificial Sequence: Synthetic oligonucleotide"
  source: /note="Description of Combined DNA/RNA Molecule: Synthetic oligonucleotide"
  source: /note="DNA/RNA"
  source: /note="5' tri-ethylene glycol (TEG)"
  modified_base (2)..(2): 5-methyl modified nucleotide
  modified_base (5)..(5): 5-methyl modified nucleotide
  modified_base (17)..(17): 5-methyl modified nucleotide
  modified_base (21)..(21): bicyclic nucleic acid (BNA)
  modified_base (22)..(22): 5-methyl bicyclic nucleic acid
  source: /note="3' tri-ethylene glycol (TEG)"
acaucaaggaagauggcauutc

SEQ ID NO: 20554 - DNA, 21 bp, Artificial Sequence
  source: /note="Description of Artificial Sequence: Synthetic oligonucleotide"
  source: /note="Description of Combined DNA/RNA Molecule: Synthetic oligonucleotide"
  source: /note="DNA/RNA"
  source: /note="5' tri-ethylene glycol (TEG)"
  modified_base (2)..(2): 5-methyl modified nucleotide
  modified_base (5)..(5): 5-methyl modified nucleotide
  modified_base (17)..(17): 5-methyl modified nucleotide
  modified_base (20)..(20): bicyclic nucleic acid (BNA)
  modified_base (21)..(21): bicyclic nucleic acid (BNA)
  source: /note="3' tri-ethylene glycol (TEG)"
acaucaaggaagauggcautt

SEQ ID NO: 20555 - DNA, 20 bp, Artificial Sequence
  source: /note="Description of Artificial Sequence: Synthetic oligonucleotide"
  source: /note="Description of Combined DNA/RNA Molecule: Synthetic oligonucleotide"
  source: /note="DNA/RNA"
  source: /note="5' tri-ethylene glycol (TEG)"
  modified_base (2)..(2): 5-methyl modified nucleotide
  modified_base (5)..(5): 5-methyl modified nucleotide
  modified_base (17)..(17): 5-methyl modified nucleotide
  modified_base (19)..(19): bicyclic nucleic acid (BNA)
  modified_base (20)..(20): bicyclic nucleic acid (BNA)
  source: /note="3' tri-ethylene glycol (TEG)"
acaucaaggaagauggcatt

SEQ ID NO: 20556 - DNA, 19 bp, Artificial Sequence
  source: /note="Description of Artificial Sequence: Synthetic oligonucleotide"
  source: /note="Description of Combined DNA/RNA Molecule: Synthetic oligonucleotide"
  source: /note="DNA/RNA"
  source: /note="5' tri-ethylene glycol (TEG)"
  modified_base (2)..(2): 5-methyl modified nucleotide
  modified_base (5)..(5): 5-methyl modified nucleotide
  modified_base (17)..(17): 5-methyl modified nucleotide
  modified_base (18)..(18): bicyclic nucleic acid (BNA)
  modified_base (19)..(19): bicyclic nucleic acid (BNA)
  source: /note="3' tri-ethylene glycol (TEG)"
acaucaaggaagauggcat

SEQ ID NO: 20557 - RNA, 18 nt, Artificial Sequence
  source: /note="Description of Artificial Sequence: Synthetic oligonucleotide"
  source: /note="RNA"
  source: /note="5' tri-ethylene glycol (TEG)"
  modified_base (2)..(2): 5-methyl modified nucleotide
  modified_base (5)..(5): 5-methyl modified nucleotide
  modified_base (17)..(17): 5-methyl bicyclic nucleic acid
  modified_base (18)..(18): bicyclic nucleic acid (BNA)
  source: /note="3' tri-ethylene glycol (TEG)"
acaucaaggaagauggca

SEQ ID NO: 20558 - RNA, 17 nt, Artificial Sequence
  source: /note="Description of Artificial Sequence: Synthetic oligonucleotide"
  source: /note="RNA"
  source: /note="5' tri-ethylene glycol (TEG)"
  modified_base (2)..(2): 5-methyl modified nucleotide
  modified_base (5)..(5): 5-methyl modified nucleotide
  modified_base (16)..(16): bicyclic nucleic acid (BNA)
  modified_base (17)..(17): 5-methyl bicyclic nucleic acid
  source: /note="3' tri-ethylene glycol (TEG)"
acaucaaggaagauggc

SEQ ID NO: 20559 - RNA, 16 nt, Artificial Sequence
  source: /note="Description of Artificial Sequence: Synthetic oligonucleotide"
  source: /note="RNA"
  source: /note="5' tri-ethylene glycol (TEG)"
  modified_base (2)..(2): 5-methyl modified nucleotide
  modified_base (5)..(5): 5-methyl modified nucleotide
  modified_base (15)..(15): bicyclic nucleic acid (BNA)
  modified_base (16)..(16): bicyclic nucleic acid (BNA)
  source: /note="3' tri-ethylene glycol (TEG)"
acaucaaggaagaugg

SEQ ID NO: 20560 - DNA, 15 bp, Artificial Sequence
  source: /note="Description of Artificial Sequence: Synthetic oligonucleotide"
  source: /note="Description of Combined DNA/RNA Molecule: Synthetic oligonucleotide"
  source: /note="DNA/RNA"
  source: /note="5' tri-ethylene glycol (TEG)"
  modified_base (2)..(2): 5-methyl modified nucleotide
  modified_base (5)..(5): 5-methyl modified nucleotide
  modified_base (14)..(14): bicyclic nucleic acid (BNA)
  modified_base (15)..(15): bicyclic nucleic acid (BNA)
  source: /note="3' tri-ethylene glycol (TEG)"
acaucaaggaagatg

SEQ ID NO: 20561 - DNA, 14 bp, Artificial Sequence
  source: /note="Description of Artificial Sequence: Synthetic oligonucleotide"
  source: /note="Description of Combined DNA/RNA Molecule: Synthetic oligonucleotide"
  source: /note="DNA/RNA"
  source: /note="5' tri-ethylene glycol (TEG)"
  modified_base (2)..(2): 5-methyl modified nucleotide
  modified_base (5)..(5): 5-methyl modified nucleotide
  modified_base (13)..(13): bicyclic nucleic acid (BNA)
  modified_base (14)..(14): bicyclic nucleic acid (BNA)
  source: /note="3' tri-ethylene glycol (TEG)"
acaucaaggaagat

SEQ ID NO: 20562 - RNA, 13 nt, Artificial Sequence
  source: /note="Description of Artificial Sequence: Synthetic oligonucleotide"
  source: /note="RNA"
  source: /note="5' tri-ethylene glycol (TEG)"
  modified_base (2)..(2): 5-methyl modified nucleotide
  modified_base (5)..(5): 5-methyl modified nucleotide
  modified_base (12)..(12): bicyclic nucleic acid (BNA)
  modified_base (13)..(13): bicyclic nucleic acid (BNA)
  source: /note="3' tri-ethylene glycol (TEG)"
acaucaaggaaga

SEQ ID NO: 20563 - RNA, 12 nt, Artificial Sequence
  source: /note="Description of Artificial Sequence: Synthetic oligonucleotide"
  source: /note="RNA"
  source: /note="5' tri-ethylene glycol (TEG)"
  modified_base (2)..(2): 5-methyl modified nucleotide
  modified_base (5)..(5): 5-methyl modified nucleotide
  modified_base (11)..(11): bicyclic nucleic acid (BNA)
  modified_base (12)..(12): bicyclic nucleic acid (BNA)
  source: /note="3' tri-ethylene glycol (TEG)"
acaucaaggaag

SEQ ID NO: 20564 - RNA, 24 nt, Artificial Sequence
  source: /note="Description of Artificial Sequence: Synthetic oligonucleotide"
  source: /note="RNA"
  source: /note="5' tri-ethylene glycol (TEG)"
  modified_base (1)..(1): 5-methyl modified nucleotide
  modified_base (4)..(4): 5-methyl modified nucleotide
  modified_base (16)..(16): 5-methyl modified nucleotide
  modified_base (21)..(21): 5-methyl modified nucleotide
  modified_base (23)..(23): bicyclic nucleic acid (BNA)
  modified_base (24)..(24): bicyclic nucleic acid (BNA)
  source: /note="3' tri-ethylene glycol (TEG)"
caucaaggaagauggcauuucuag

SEQ ID NO: 20565 - DNA, 23 bp, Artificial Sequence
  source: /note="Description of Artificial Sequence: Synthetic oligonucleotide"
  source: /note="Description of Combined DNA/RNA Molecule: Synthetic oligonucleotide"
  source: /note="DNA/RNA"
  source: /note="5' tri-ethylene glycol (TEG)"
  modified_base (1)..(1): 5-methyl modified nucleotide
  modified_base (4)..(4): 5-methyl modified nucleotide
  modified_base (16)..(16): 5-methyl modified nucleotide
  modified_base (21)..(21): 5-methyl modified nucleotide
  modified_base (22)..(22): bicyclic nucleic acid (BNA)
  modified_base (23)..(23): bicyclic nucleic acid (BNA)
  source: /note="3' tri-ethylene glycol (TEG)"
caucaaggaagauggcauuucta

SEQ ID NO: 20566 - DNA, 22 bp, Artificial Sequence
  source: /note="Description of Artificial Sequence: Synthetic oligonucleotide"
  source: /note="Description of Combined DNA/RNA Molecule: Synthetic oligonucleotide"
  source: /note="DNA/RNA"
  source: /note="5' tri-ethylene glycol (TEG)"
  modified_base (1)..(1): 5-methyl modified nucleotide
  modified_base (4)..(4): 5-methyl modified nucleotide
  modified_base (16)..(16): 5-methyl modified nucleotide
  modified_base (21)..(21): 5-methyl bicyclic nucleic acid
  modified_base (22)..(22): bicyclic nucleic acid (BNA)
  source: /note="3' tri-ethylene glycol (TEG)"
caucaaggaagauggcauuuct

SEQ ID NO: 20567 - DNA, 21 bp, Artificial Sequence
  source: /note="Description of Artificial Sequence: Synthetic oligonucleotide"
  source: /note="Description of Combined DNA/RNA Molecule: Synthetic oligonucleotide"
  source: /note="DNA/RNA"
  source: /note="5' tri-ethylene glycol (TEG)"
  modified_base (1)..(1): 5-methyl modified nucleotide
  modified_base (4)..(4): 5-methyl modified nucleotide
  modified_base (16)..(16): 5-methyl modified nucleotide
  modified_base (20)..(20): bicyclic nucleic acid (BNA)
  modified_base (21)..(21): 5-methyl bicyclic nucleic acid
  source: /note="3' tri-ethylene glycol (TEG)"
caucaaggaagauggcauutc

SEQ ID NO: 20568 - DNA, 20 bp, Artificial Sequence
  source: /note="Description of Artificial Sequence: Synthetic oligonucleotide"
  source: /note="Description of Combined DNA/RNA Molecule: Synthetic oligonucleotide"
  source: /note="DNA/RNA"
  source: /note="5' tri-ethylene glycol (TEG)"
  modified_base (1)..(1): 5-methyl modified nucleotide
  modified_base (4)..(4): 5-methyl modified nucleotide
  modified_base (16)..(16): 5-methyl modified nucleotide
  modified_base (19)..(19): bicyclic nucleic acid (BNA)
  modified_base (20)..(20): bicyclic nucleic acid (BNA)
  source: /note="3' tri-ethylene glycol (TEG)"
caucaaggaagauggcautt

SEQ ID NO: 20569 - DNA, 19 bp, Artificial Sequence
  source: /note="Description of Artificial Sequence: Synthetic oligonucleotide"
  source: /note="Description of Combined DNA/RNA Molecule: Synthetic oligonucleotide"
  source: /note="DNA/RNA"
  source: /note="5' tri-ethylene glycol (TEG)"
  modified_base (1)..(1): 5-methyl modified nucleotide
  modified_base (4)..(4): 5-methyl modified nucleotide
  modified_base (16)..(16): 5-methyl modified nucleotide
  modified_base (18)..(18): bicyclic nucleic acid (BNA)
  modified_base (19)..(19): bicyclic nucleic acid (BNA)
  source: /note="3' tri-ethylene glycol (TEG)"
caucaaggaagauggcatt

SEQ ID NO: 20570 - DNA, 18 bp, Artificial Sequence
  source: /note="Description of Artificial Sequence: Synthetic oligonucleotide"
  source: /note="Description of Combined DNA/RNA Molecule: Synthetic oligonucleotide"
  source: /note="DNA/RNA"
  source: /note="5' tri-ethylene glycol (TEG)"
  modified_base (1)..(1): 5-methyl modified nucleotide
  modified_base (4)..(4): 5-methyl modified nucleotide
  modified_base (16)..(16): 5-methyl modified nucleotide
  modified_base (17)..(17): bicyclic nucleic acid (BNA)
  modified_base (18)..(18): bicyclic nucleic acid (BNA)
  source: /note="3' tri-ethylene glycol (TEG)"
caucaaggaagauggcat

SEQ ID NO: 20571 - RNA, 17 nt, Artificial Sequence
  source: /note="Description of Artificial Sequence: Synthetic oligonucleotide"
  source: /note="RNA"
  source: /note="5' tri-ethylene glycol (TEG)"
  modified_base (1)..(1): 5-methyl modified nucleotide
  modified_base (4)..(4): 5-methyl modified nucleotide
  modified_base (16)..(16): 5-methyl bicyclic nucleic acid
  modified_base (17)..(17): bicyclic nucleic acid (BNA)
  source: /note="3' tri-ethylene glycol (TEG)"
caucaaggaagauggca

SEQ ID NO: 20572 - RNA, 16 nt, Artificial Sequence
  source: /note="Description of Artificial Sequence: Synthetic oligonucleotide"
  source: /note="RNA"
  source: /note="5' tri-ethylene glycol (TEG)"
  modified_base (1)..(1): 5-methyl modified nucleotide
  modified_base (4)..(4): 5-methyl modified nucleotide
  modified_base (15)..(15): bicyclic nucleic acid (BNA)
  modified_base (16)..(16): 5-methyl bicyclic nucleic acid
  source: /note="3' tri-ethylene glycol (TEG)"
caucaaggaagauggc

SEQ ID NO: 20573 - RNA, 15 nt, Artificial Sequence
  source: /note="Description of Artificial Sequence: Synthetic oligonucleotide"
  source: /note="RNA"
  source: /note="5' tri-ethylene glycol (TEG)"
  modified_base (1)..(1): 5-methyl modified nucleotide
  modified_base (4)..(4): 5-methyl modified nucleotide
  modified_base (14)..(14): bicyclic nucleic acid (BNA)
  modified_base (15)..(15): bicyclic nucleic acid (BNA)
  source: /note="3' tri-ethylene glycol (TEG)"
caucaaggaagaugg

SEQ ID NO: 20574 - DNA, 14 bp, Artificial Sequence
  source: /note="Description of Artificial Sequence: Synthetic oligonucleotide"
  source: /note="Description of Combined DNA/RNA Molecule: Synthetic oligonucleotide"
  source: /note="DNA/RNA"
  source: /note="5' tri-ethylene glycol (TEG)"
  modified_base (1)..(1): 5-methyl modified nucleotide
  modified_base (4)..(4): 5-methyl modified nucleotide
  modified_base (13)..(13): bicyclic nucleic acid (BNA)
  modified_base (14)..(14): bicyclic nucleic acid (BNA)
  source: /note="3' tri-ethylene glycol (TEG)"
caucaaggaagatg

SEQ ID NO: 20575 - DNA, 13 bp, Artificial Sequence
  source: /note="Description of Artificial Sequence: Synthetic oligonucleotide"
  source: /note="Description of Combined DNA/RNA Molecule: Synthetic oligonucleotide"
  source: /note="DNA/RNA"
  source: /note="5' tri-ethylene glycol (TEG)"
  modified_base (1)..(1): 5-methyl modified nucleotide
  modified_base (4)..(4): 5-methyl modified nucleotide
  modified_base (12)..(12): bicyclic nucleic acid (BNA)
  modified_base (13)..(13): bicyclic nucleic acid (BNA)
  source: /note="3' tri-ethylene glycol (TEG)"
caucaaggaagat

SEQ ID NO: 20576 - RNA, 12 nt, Artificial Sequence
  source: /note="Description of Artificial Sequence: Synthetic oligonucleotide"
  source: /note="RNA"
  source: /note="5' tri-ethylene glycol (TEG)"
  modified_base (1)..(1): 5-methyl modified nucleotide
  modified_base (4)..(4): 5-methyl modified nucleotide
  modified_base (11)..(11): bicyclic nucleic acid (BNA)
  modified_base (12)..(12): bicyclic nucleic acid (BNA)
  source: /note="3' tri-ethylene glycol (TEG)"
caucaaggaaga

SEQ ID NO: 20577 - RNA, 11 nt, Artificial Sequence
  source: /note="Description of Artificial Sequence: Synthetic oligonucleotide"
  source: /note="RNA"
  source: /note="5' tri-ethylene glycol (TEG)"
  modified_base (1)..(1): 5-methyl modified nucleotide
  modified_base (4)..(4): 5-methyl modified nucleotide
  modified_base (10)..(10): bicyclic nucleic acid (BNA)
  modified_base (11)..(11): bicyclic nucleic acid (BNA)
  source: /note="3' tri-ethylene glycol (TEG)"
caucaaggaag

SEQ ID NO: 20578 - RNA, 23 nt, Artificial Sequence
  source: /note="Description of Artificial Sequence: Synthetic oligonucleotide"
  source: /note="RNA"
  source: /note="5' tri-ethylene glycol (TEG)"
  modified_base (3)..(3): 5-methyl modified nucleotide
  modified_base (15)..(15): 5-methyl modified nucleotide
  modified_base (20)..(20): 5-methyl modified nucleotide
  modified_base (22)..(22): bicyclic nucleic acid (BNA)
  modified_base (23)..(23): bicyclic nucleic acid (BNA)
  source: /note="3' tri-ethylene glycol (TEG)"
aucaaggaagauggcauuucuag

SEQ ID NO: 20579 - DNA, 22 bp, Artificial Sequence
  source: /note="Description of Artificial Sequence: Synthetic oligonucleotide"
  source: /note="Description of Combined DNA/RNA Molecule: Synthetic oligonucleotide"
  source: /note="DNA/RNA"
  source: /note="5' tri-ethylene glycol (TEG)"
  modified_base (3)..(3): 5-methyl modified nucleotide
  modified_base (15)..(15): 5-methyl modified nucleotide
  modified_base (20)..(20): 5-methyl modified nucleotide
  modified_base (21)..(21): bicyclic nucleic acid (BNA)
  modified_base (22)..(22): bicyclic nucleic acid (BNA)
  source: /note="3' tri-ethylene glycol (TEG)"
aucaaggaagauggcauuucta

SEQ ID NO: 20580 - DNA, 21 bp, Artificial Sequence
  source: /note="Description of Artificial Sequence: Synthetic oligonucleotide"
  source: /note="Description of Combined DNA/RNA Molecule: Synthetic oligonucleotide"
  source: /note="DNA/RNA"
  source: /note="5' tri-ethylene glycol (TEG)"
  modified_base (3)..(3): 5-methyl modified nucleotide
  modified_base (15)..(15): 5-methyl modified nucleotide
  modified_base (20)..(20): 5-methyl bicyclic nucleic acid
  modified_base (21)..(21): bicyclic nucleic acid (BNA)
  source: /note="3' tri-ethylene glycol (TEG)"
aucaaggaagauggcauuuct

SEQ ID NO: 20581 - DNA, 20 bp, Artificial Sequence
  source: /note="Description of Artificial Sequence: Synthetic oligonucleotide"
  source: /note="Description of Combined DNA/RNA Molecule: Synthetic oligonucleotide"
  source: /note="DNA/RNA"
  source: /note="5' tri-ethylene glycol (TEG)"
  modified_base (3)..(3): 5-methyl modified nucleotide
  modified_base (15)..(15): 5-methyl modified nucleotide
  modified_base (19)..(19): bicyclic nucleic acid (BNA)
  modified_base (20)..(20): 5-methyl bicyclic nucleic acid
  source: /note="3' tri-ethylene glycol (TEG)"
aucaaggaagauggcauutc

SEQ ID NO: 20582 - DNA, 19 bp, Artificial Sequence
  source: /note="Description of Artificial Sequence: Synthetic oligonucleotide"
  source: /note="Description of Combined DNA/RNA Molecule: Synthetic oligonucleotide"
  source: /note="DNA/RNA"
  source: /note="5' tri-ethylene glycol (TEG)"
  modified_base (3)..(3): 5-methyl modified nucleotide
  modified_base (15)..(15): 5-methyl modified nucleotide
  modified_base (18)..(18): bicyclic nucleic acid (BNA)
  modified_base (19)..(19): bicyclic nucleic acid (BNA)
  source: /note="3' tri-ethylene glycol (TEG)"
aucaaggaagauggcautt

SEQ ID NO: 20583 - DNA, 18 bp, Artificial Sequence
  source: /note="Description of Artificial Sequence: Synthetic oligonucleotide"
  source: /note="Description of Combined DNA/RNA Molecule: Synthetic oligonucleotide"
  source: /note="DNA/RNA"
  source: /note="5' tri-ethylene glycol (TEG)"
  modified_base (3)..(3): 5-methyl modified nucleotide
  modified_base (15)..(15): 5-methyl modified nucleotide
  modified_base (17)..(17): bicyclic nucleic acid (BNA)
  modified_base (18)..(18): bicyclic nucleic acid (BNA)
  source: /note="3' tri-ethylene glycol (TEG)"
aucaaggaagauggcatt

SEQ ID NO: 20584 - DNA, 17 bp, Artificial Sequence
  source: /note="Description of Artificial Sequence: Synthetic oligonucleotide"
  source: /note="Description of Combined DNA/RNA Molecule: Synthetic oligonucleotide"
  source: /note="DNA/RNA"
  source: /note="5' tri-ethylene glycol (TEG)"
  modified_base (3)..(3): 5-methyl modified nucleotide
  modified_base (15)..(15): 5-methyl modified nucleotide
  modified_base (16)..(16): bicyclic nucleic acid (BNA)
  modified_base (17)..(17): bicyclic nucleic acid (BNA)
  source: /note="3' tri-ethylene glycol (TEG)"
aucaaggaagauggcat

SEQ ID NO: 20585 - RNA, 16 nt, Artificial Sequence
  source: /note="Description of Artificial Sequence: Synthetic oligonucleotide"
  source: /note="RNA"
  source: /note="5' tri-ethylene glycol (TEG)"
  modified_base (3)..(3): 5-methyl modified nucleotide
  modified_base (15)..(15): 5-methyl bicyclic nucleic acid
  modified_base (16)..(16): bicyclic nucleic acid (BNA)
  source: /note="3' tri-ethylene glycol (TEG)"
aucaaggaagauggca

SEQ ID NO: 20586 - RNA, 15 nt, Artificial Sequence
  source: /note="Description of Artificial Sequence: Synthetic oligonucleotide"
  source: /note="RNA"
  source: /note="5' tri-ethylene glycol (TEG)"
  modified_base (3)..(3): 5-methyl modified nucleotide
  modified_base (14)..(14): bicyclic nucleic acid (BNA)
  modified_base (15)..(15): 5-methyl bicyclic nucleic acid
  source: /note="3' tri-ethylene glycol (TEG)"
aucaaggaagauggc

SEQ ID NO: 20587 - RNA, 14 nt, Artificial Sequence
  source: /note="Description of Artificial Sequence: Synthetic oligonucleotide"
  source: /note="RNA"
  source: /note="5' tri-ethylene glycol (TEG)"
  modified_base (3)..(3): 5-methyl modified nucleotide
  modified_base (13)..(13): bicyclic nucleic acid (BNA)
  modified_base (14)..(14): bicyclic nucleic acid (BNA)
  source: /note="3' tri-ethylene glycol (TEG)"
aucaaggaagaugg

SEQ ID NO: 20588 - DNA, 13 bp, Artificial Sequence
  source: /note="Description of Artificial Sequence: Synthetic oligonucleotide"
  source: /note="Description of Combined DNA/RNA Molecule: Synthetic oligonucleotide"
  source: /note="DNA/RNA"
  source: /note="5' tri-ethylene glycol (TEG)"
  modified_base (3)..(3): 5-methyl modified nucleotide
  modified_base (12)..(12): bicyclic nucleic acid (BNA)
  modified_base (13)..(13): bicyclic nucleic acid (BNA)
  source: /note="3' tri-ethylene glycol (TEG)"
aucaaggaagatg

SEQ ID NO: 20589 - DNA, 12 bp, Artificial Sequence
  source: /note="Description of Artificial Sequence: Synthetic oligonucleotide"
  source: /note="Description of Combined DNA/RNA Molecule: Synthetic oligonucleotide"
  source: /note="DNA/RNA"
  source: /note="5' tri-ethylene glycol (TEG)"
  modified_base (3)..(3): 5-methyl modified nucleotide
  modified_base (11)..(11): bicyclic nucleic acid (BNA)
  modified_base (12)..(12): bicyclic nucleic acid (BNA)
  source: /note="3' tri-ethylene glycol (TEG)"
aucaaggaagat

SEQ ID NO: 20590 - RNA, 11 nt, Artificial Sequence
  source: /note="Description of Artificial Sequence: Synthetic oligonucleotide"
  source: /note="RNA"
  source: /note="5' tri-ethylene glycol (TEG)"
  modified_base (3)..(3): 5-methyl modified nucleotide
  modified_base (10)..(10): bicyclic nucleic acid (BNA)
  modified_base (11)..(11): bicyclic nucleic acid (BNA)
  source: /note="3' tri-ethylene glycol (TEG)"
aucaaggaaga

SEQ ID NO: 20591 - RNA, 10 nt, Artificial Sequence
  source: /note="Description of Artificial Sequence: Synthetic oligonucleotide"
  source: /note="RNA"
  source: /note="5' tri-ethylene glycol (TEG)"
  modified_base (3)..(3): 5-methyl modified nucleotide
  modified_base (9)..(9): bicyclic nucleic acid (BNA)
  modified_base (10)..(10): bicyclic nucleic acid (BNA)
  source: /note="3' tri-ethylene glycol (TEG)"
aucaaggaag

SEQ ID NO: 20592 - DNA, 23 bp, Artificial Sequence
  source: /note="Description of Artificial Sequence: Synthetic oligonucleotide"
  source: /note="Description of Combined DNA/RNA Molecule: Synthetic oligonucleotide"
  source: /note="DNA/RNA"
  source: /note="5' tri-ethylene glycol (TEG)"
  modified_base (1)..(1): 5-methyl modified nucleotide
  modified_base (2)..(2): 5-methyl modified nucleotide
  modified_base (7)..(7): 5-methyl modified nucleotide
  modified_base (13)..(13): 5-methyl modified nucleotide
  modified_base (14)..(14): 5-methyl modified nucleotide
  modified_base (16)..(16): 5-methyl modified nucleotide
  modified_base (17)..(17): 5-methyl modified nucleotide
  modified_base (20)..(20): 5-methyl modified nucleotide
  modified_base (22)..(22): bicyclic nucleic acid (BNA)
  modified_base (23)..(23): 5-methyl bicyclic nucleic acid
  source: /note="3' tri-ethylene glycol (TEG)"
ccagagcagguaccuccaacatc

SEQ ID NO: 20593 - RNA, 18 nt, Artificial Sequence
  source: /note="Description of Artificial Sequence: Synthetic oligonucleotide"
  source: /note="RNA"
  source: /note="5' tri-ethylene glycol (TEG)"
  modified_base (1)..(1): 5-methyl modified nucleotide
  modified_base (2)..(2): 5-methyl modified nucleotide
  modified_base (7)..(7): 5-methyl modified nucleotide
  modified_base (13)..(13): 5-methyl modified nucleotide
  modified_base (14)..(14): 5-methyl modified nucleotide
  modified_base (16)..(16): 5-methyl modified nucleotide
  modified_base (17)..(17): 5-methyl bicyclic nucleic acid
  modified_base (18)..(18): bicyclic nucleic acid (BNA)
  source: /note="3' tri-ethylene glycol (TEG)"
ccagagcagguaccucca

SEQ ID NO: 20594 - DNA, 23 bp, Artificial Sequence
  source: /note="Description of Artificial Sequence: Synthetic oligonucleotide"
  source: /note="Description of Combined DNA/RNA Molecule: Synthetic oligonucleotide"
  source: /note="DNA/RNA"
  source: /note="5' tri-ethylene glycol (TEG)"
  modified_base (1)..(1): 5-methyl modified nucleotide
  modified_base (2)..(2): 5-methyl modified nucleotide
  modified_base (4)..(4): 5-methyl modified nucleotide
  modified_base (18)..(18): 5-methyl modified nucleotide
  modified_base (22)..(22): bicyclic nucleic acid (BNA)
  modified_base (23)..(23): bicyclic nucleic acid (BNA)
  source: /note="3' tri-ethylene glycol (TEG)"
ccucugugauuuuauaacuugat

SEQ ID NO: 20595 - DNA, 17 bp, Artificial Sequence
  source: /note="Description of Artificial Sequence: Synthetic oligonucleotide"
  source: /note="Description of Combined DNA/RNA Molecule: Synthetic oligonucleotide"
  source: /note="DNA/RNA"
  source: /note="5' tri-ethylene glycol (TEG)"
  modified_base (2)..(2): 5-methyl modified nucleotide
  modified_base (4)..(4): 5-methyl modified nucleotide
  modified_base (5)..(5): 5-methyl modified nucleotide
  modified_base (6)..(6): 5-methyl modified nucleotide
  modified_base (8)..(8): 5-methyl modified nucleotide
  modified_base (9)..(9): 5-methyl modified nucleotide
  modified_base (12)..(12): 5-methyl modified nucleotide
  modified_base (14)..(14): 5-methyl modified nucleotide
  modified_base (15)..(15): 5-methyl modified nucleotide
  modified_base (16)..(16): 5-methyl bicyclic nucleic acid
  modified_base (17)..(17): bicyclic nucleic acid (BNA)
  source: /note="3' tri-ethylene glycol (TEG)"
ucacccaccaucaccct

SEQ ID NO: 20596 - RNA, 20 nt, Artificial Sequence
  source: /note="Description of Artificial Sequence: Synthetic oligonucleotide"
  source: /note="RNA"
  source: /note="5' tri-ethylene glycol (TEG)"
  modified_base (7)..(7): 5-methyl modified nucleotide
  modified_base (8)..(8): 5-methyl modified nucleotide
  modified_base (10)..(10): 5-methyl modified nucleotide
  modified_base (16)..(16): 5-methyl modified nucleotide
  modified_base (18)..(18): 5-methyl modified nucleotide
  modified_base (19)..(19): 5-methyl bicyclic nucleic acid
  modified_base (20)..(20): 5-methyl bicyclic nucleic acid
  source: /note="3' tri-ethylene glycol (TEG)"
ugauauccucaaggucaccc

SEQ ID NO: 20597 - DNA, 22 bp, Artificial Sequence
  source: /note="Description of Artificial Sequence: Synthetic oligonucleotide"
  source: /note="Description of Combined DNA/RNA Molecule: Synthetic oligonucleotide"
  source: /note="DNA/RNA"
  source: /note="5' tri-ethylene glycol (TEG)"
  modified_base (1)..(1): 5-methyl modified nucleotide
  modified_base (4)..(4): 5-methyl modified nucleotide
  modified_base (13)..(13): 5-methyl modified nucleotide
  modified_base (16)..(16): 5-methyl modified nucleotide
  modified_base (18)..(18): 5-methyl modified nucleotide
  modified_base (21)..(21): bicyclic nucleic acid (BNA)
  modified_base (22)..(22): bicyclic nucleic acid (BNA)
  source: /note="3' tri-ethylene glycol (TEG)"
cugcuugaugaucaucucgutg

SEQ ID NO: 20598 - DNA, 18 bp, Artificial Sequence
  source: /note="Description of Artificial Sequence: Synthetic oligonucleotide"
  source: /note="Description of Combined DNA/RNA Molecule: Synthetic oligonucleotide"
  source: /note="DNA/RNA"
  source: /note="5' tri-ethylene glycol (TEG)"
  modified_base (1)..(1): 5-methyl modified nucleotide
  modified_base (4)..(4): 5-methyl modified nucleotide
  modified_base (13)..(13): 5-methyl modified nucleotide
  modified_base (16)..(16): 5-methyl modified nucleotide
  modified_base (17)..(17): bicyclic nucleic acid (BNA)
  modified_base (18)..(18): 5-methyl bicyclic nucleic acid
  source: /note="3' tri-ethylene glycol (TEG)"
cugcuugaugaucauctc

SEQ ID NO: 20599 - RNA, 19 nt, Artificial Sequence
  source: /note="Description of Artificial Sequence: Synthetic oligonucleotide"
  source: /note="RNA"
  source: /note="5' tri-ethylene glycol (TEG)"
  modified_base (5)..(5): 5-methyl modified nucleotide
  modified_base (6)..(6): 5-methyl modified nucleotide
  modified_base (14)..(14): 5-methyl modified nucleotide
  modified_base (15)..(15): 5-methyl modified nucleotide
  modified_base (17)..(17): 5-methyl modified nucleotide
  modified_base (18)..(18): bicyclic nucleic acid (BNA)
  modified_base (19)..(19): bicyclic nucleic acid (BNA)
  source: /note="3' tri-ethylene glycol (TEG)"
guuuccuuaguaaccacag

SEQ ID NO: 20600 - RNA, 17 nt, Artificial Sequence
  source: /note="Description of Artificial Sequence: Synthetic oligonucleotide"
  source: /note="RNA"
  source: /note="5' tri-ethylene glycol (TEG)"
  modified_base (5)..(5): 5-methyl modified nucleotide
  modified_base (6)..(6): 5-methyl modified nucleotide
  modified_base (14)..(14): 5-methyl modified nucleotide
  modified_base (15)..(15): 5-methyl modified nucleotide
  modified_base (16)..(16): bicyclic nucleic acid (BNA)
  modified_base (17)..(17): 5-methyl bicyclic nucleic acid
  source: /note="3' tri-ethylene glycol (TEG)"
guuuccuuaguaaccac

SEQ ID NO: 20601 - DNA, 20 bp, Artificial Sequence
  source: /note="Description of Artificial Sequence: Synthetic oligonucleotide"
  source: /note="Description of Combined DNA/RNA Molecule: Synthetic oligonucleotide"
  source: /note="DNA/RNA"
  modified_base (1)..(1): bicyclic nucleic acid (BNA)
  modified_base (2)..(2): 5-methyl bicyclic nucleic acid
  modified_base (14)..(14): 5-methyl modified nucleotide
  modified_base (19)..(19): 5-methyl bicyclic nucleic acid
  modified_base (20)..(20): bicyclic nucleic acid (BNA)
tcaaggaagauggcauuuct

SEQ ID NO: 20602 - DNA, 22 bp, Artificial Sequence
  source: /note="Description of Artificial Sequence: Synthetic oligonucleotide"
  source: /note="Description of Combined DNA/RNA Molecule: Synthetic oligonucleotide"
  source: /note="DNA/RNA"
  modified_base (1)..(1): bicyclic nucleic acid (BNA)
  modified_base (2)..(2): 5-methyl bicyclic nucleic acid
  modified_base (14)..(14): 5-methyl modified nucleotide
  modified_base (19)..(19): 5-methyl modified nucleotide
  modified_base (21)..(21): bicyclic nucleic acid (BNA)
  modified_base (22)..(22): bicyclic nucleic acid (BNA)
tcaaggaagauggcauuucuag

SEQ ID NO: 20603 - RNA, 18 nt, Artificial Sequence
  source: /note="Description of Artificial Sequence: Synthetic oligonucleotide"
  source: /note="RNA"
  modified_base (1)..(1): bicyclic nucleic acid (BNA)
  modified_base (2)..(2): bicyclic nucleic acid (BNA)
  modified_base (9)..(9): 5-methyl modified nucleotide
  modified_base (13)..(13): 5-methyl modified nucleotide
  modified_base (14)..(14): 5-methyl modified nucleotide
  modified_base (17)..(17): bicyclic nucleic acid (BNA)
  modified_base (18)..(18): 5-methyl bicyclic nucleic acid
gguaaguucuguccaagc

SEQ ID NO: 20604 - DNA, 18 bp, Artificial Sequence
  source: /note="Description of Artificial Sequence: Synthetic oligonucleotide"
  source: /note="Description of Combined DNA/RNA Molecule: Synthetic oligonucleotide"
  source: /note="DNA/RNA"
  modified_base (1)..(1): bicyclic nucleic acid (BNA)
  modified_base (2)..(2): bicyclic nucleic acid (BNA)
  modified_base (8)..(8): 5-methyl modified nucleotide
  modified_base (12)..(12): 5-methyl modified nucleotide
  modified_base (13)..(13): 5-methyl modified nucleotide
  modified_base (17)..(17): 5-methyl bicyclic nucleic acid
  modified_base (18)..(18): 5-methyl bicyclic nucleic acid
gtaaguucuguccaagcc

SEQ ID NO: 20605 - RNA, 18 nt, Artificial Sequence
  source: /note="Description of Artificial Sequence: Synthetic oligonucleotide"
  source: /note="RNA"
  modified_base (1)..(1): bicyclic nucleic acid (BNA)
  modified_base (2)..(2): bicyclic nucleic acid (BNA)
  modified_base (4)..(4): 5-methyl modified nucleotide
  modified_base (13)..(13): 5-methyl modified nucleotide
  modified_base (17)..(17): 5-methyl bicyclic nucleic acid
  modified_base (18)..(18): 5-methyl bicyclic nucleic acid
agucgguaaguucugucc

SEQ ID NO: 20606 - DNA, 18 bp, Artificial Sequence
  source: /note="Description of Artificial Sequence: Synthetic oligonucleotide"
  source: /note="Description of Combined DNA/RNA Molecule: Synthetic oligonucleotide"
  source: /note="DNA/RNA"
  modified_base (1)..(1): 5-methyl bicyclic nucleic acid
  modified_base (2)..(2): bicyclic nucleic acid (BNA)
  modified_base (5)..(5): 5-methyl modified nucleotide
  modified_base (6)..(6): 5-methyl modified nucleotide
  modified_base (10)..(10): 5-methyl modified nucleotide
  modified_base (11)..(11): 5-methyl modified nucleotide
  modified_base (12)..(12): 5-methyl modified nucleotide
  modified_base (17)..(17): bicyclic nucleic acid (BNA)
  modified_base (18)..(18): bicyclic nucleic acid (BNA)
ctguccaagcccgguuga

SEQ ID NO: 20607 - DNA, 15 bp, Artificial Sequence
  source: /note="Description of Artificial Sequence: Synthetic oligonucleotide"
  source: /note="Description of Combined DNA/RNA Molecule: Synthetic oligonucleotide"
  source: /note="DNA/RNA"
  modified_base (1)..(1): bicyclic nucleic acid (BNA)
  modified_base (2)..(2): bicyclic nucleic acid (BNA)
  modified_base (7)..(7): 5-methyl modified nucleotide
  modified_base (11)..(11): 5-methyl modified nucleotide
  modified_base (12)..(12): 5-methyl modified nucleotide
  modified_base (14)..(14): bicyclic nucleic acid (BNA)
  modified_base (15)..(15): bicyclic nucleic acid (BNA)
taaguucuguccaag

SEQ ID NO: 20608 - DNA, 20 bp, Artificial Sequence
  source: /note="Description of Artificial Sequence: Synthetic oligonucleotide"
  source: /note="Description of Combined DNA/RNA Molecule: Synthetic oligonucleotide"
  source: /note="DNA/RNA"
  modified_base (1)..(1): bicyclic nucleic acid (BNA)
  modified_base (2)..(2): bicyclic nucleic acid (BNA)
  modified_base (3)..(3): 5-methyl modified nucleotide
  modified_base (7)..(7): 5-methyl modified nucleotide
  modified_base (8)..(8): 5-methyl modified nucleotide
  modified_base (12)..(12): 5-methyl modified nucleotide
  modified_base (13)..(13): 5-methyl modified nucleotide
  modified_base (14)..(14): 5-methyl modified nucleotide
  modified_base (19)..(19): bicyclic nucleic acid (BNA)
  modified_base (20)..(20): bicyclic nucleic acid (BNA)
ttcuguccaagcccgguuga

SEQ ID NO: 20609 - DNA, 19 bp, Artificial Sequence
  source: /note="Description of Artificial Sequence: Synthetic oligonucleotide"
  source: /note="Description of Combined DNA/RNA Molecule: Synthetic oligonucleotide"
  source: /note="DNA/RNA"
  modified_base (1)..(1): bicyclic nucleic acid (BNA)
  modified_base (2)..(2): bicyclic nucleic acid (BNA)
  modified_base (3)..(3): 5-methyl modified nucleotide
  modified_base (7)..(7): 5-methyl modified nucleotide
  modified_base (8)..(8): 5-methyl modified nucleotide
  modified_base (12)..(12): 5-methyl modified nucleotide
  modified_base (13)..(13): 5-methyl modified nucleotide
  modified_base (14)..(14): 5-methyl modified nucleotide
  modified_base (18)..(18): bicyclic nucleic acid (BNA)
  modified_base (19)..(19): bicyclic nucleic acid (BNA)
ttcuguccaagcccggutg

SEQ ID NO: 20610 - DNA, 18 bp, Artificial Sequence
  source: /note="Description of Artificial Sequence: Synthetic oligonucleotide"
  source: /note="Description of Combined DNA/RNA Molecule: Synthetic oligonucleotide"
  source: /note="DNA/RNA"
  modified_base (1)..(1): bicyclic nucleic acid (BNA)
  modified_base (2)..(2): bicyclic nucleic acid (BNA)
  modified_base (3)..(3): 5-methyl modified nucleotide
  modified_base (7)..(7): 5-methyl modified nucleotide
  modified_base (8)..(8): 5-methyl modified nucleotide
  modified_base (12)..(12): 5-methyl modified nucleotide
  modified_base (13)..(13): 5-methyl modified nucleotide
  modified_base (14)..(14): 5-methyl modified nucleotide
  modified_base (17)..(17): bicyclic nucleic acid (BNA)
  modified_base (18)..(18): bicyclic nucleic acid (BNA)
ttcuguccaagcccggtt

SEQ ID NO: 20611 - DNA, 17 bp, Artificial Sequence
  source: /note="Description of Artificial Sequence: Synthetic oligonucleotide"
  source: /note="Description of Combined DNA/RNA Molecule: Synthetic oligonucleotide"
  source: /note="DNA/RNA"
  modified_base (1)..(1): bicyclic nucleic acid (BNA)
  modified_base (2)..(2): bicyclic nucleic acid (BNA)
  modified_base (3)..(3): 5-methyl modified nucleotide
  modified_base (7)..(7): 5-methyl modified nucleotide
  modified_base (8)..(8): 5-methyl modified nucleotide
  modified_base (12)..(12): 5-methyl modified nucleotide
  modified_base (13)..(13): 5-methyl modified nucleotide
  modified_base (14)..(14): 5-methyl modified nucleotide
  modified_base (16)..(16): bicyclic nucleic acid (BNA)
  modified_base (17)..(17): bicyclic nucleic acid (BNA)
ttcuguccaagcccggt

SEQ ID NO: 20612 - DNA, 16 bp, Artificial Sequence
  source: /note="Description of Artificial Sequence: Synthetic oligonucleotide"
  source: /note="Description of Combined DNA/RNA Molecule: Synthetic oligonucleotide"
  source: /note="DNA/RNA"
  modified_base (1)..(1): bicyclic nucleic acid (BNA)
  modified_base (2)..(2): bicyclic nucleic acid (BNA)
  modified_base (3)..(3): 5-methyl modified nucleotide
  modified_base (7)..(7): 5-methyl modified nucleotide
  modified_base (8)..(8): 5-methyl modified nucleotide
  modified_base (12)..(12): 5-methyl modified nucleotide
  modified_base (13)..(13): 5-methyl modified nucleotide
  modified_base (14)..(14): 5-methyl modified nucleotide
  modified_base (15)..(15): bicyclic nucleic acid (BNA)
  modified_base (16)..(16): bicyclic nucleic acid (BNA)
ttcuguccaagcccgg

SEQ ID NO: 20613 - DNA, 15 bp, Artificial Sequence
  source: /note="Description of Artificial Sequence: Synthetic oligonucleotide"
  source: /note="Description of Combined DNA/RNA Molecule: Synthetic oligonucleotide"
  source: /note="DNA/RNA"
  modified_base (1)..(1): bicyclic nucleic acid (BNA)
  modified_base (2)..(2): bicyclic nucleic acid (BNA)
  modified_base (3)..(3): 5-methyl modified nucleotide
  modified_base (7)..(7): 5-methyl modified nucleotide
  modified_base (8)..(8): 5-methyl modified nucleotide
  modified_base (12)..(12): 5-methyl modified nucleotide
  modified_base (13)..(13): 5-methyl modified nucleotide
  modified_base (14)..(14): 5-methyl bicyclic nucleic acid
  modified_base (15)..(15): bicyclic nucleic acid (BNA)
ttcuguccaagcccg

SEQ ID NO: 20614 - DNA, 14 bp, Artificial Sequence
  source: /note="Description of Artificial Sequence: Synthetic oligonucleotide"
  source: /note="Description of Combined DNA/RNA Molecule: Synthetic oligonucleotide"
  source: /note="DNA/RNA"
  modified_base (1)..(1): bicyclic nucleic acid (BNA)
  modified_base (2)..(2): bicyclic nucleic acid (BNA)
  modified_base (3)..(3): 5-methyl modified nucleotide
  modified_base (7)..(7): 5-methyl modified nucleotide
  modified_base (8)..(8): 5-methyl modified nucleotide
  modified_base (12)..(12): 5-methyl modified nucleotide
  modified_base (13)..(13): 5-methyl bicyclic nucleic acid
  modified_base (14)..(14): 5-methyl bicyclic nucleic acid
ttcuguccaagccc

SEQ ID NO: 20615 - DNA, 13 bp, Artificial Sequence
  source: /note="Description of Artificial Sequence: Synthetic oligonucleotide"
  source: /note="Description of Combined DNA/RNA Molecule: Synthetic oligonucleotide"
  source: /note="DNA/RNA"
  modified_base (1)..(1): bicyclic nucleic acid (BNA)
  modified_base (2)..(2): bicyclic nucleic acid (BNA)
  modified_base (3)..(3): 5-methyl modified nucleotide
  modified_base (7)..(7): 5-methyl modified nucleotide
  modified_base (8)..(8): 5-methyl modified nucleotide
  modified_base (12)..(12): 5-methyl bicyclic nucleic acid
  modified_base (13)..(13): 5-methyl bicyclic nucleic acid
ttcuguccaagcc

SEQ ID NO: 20616 - DNA, 12 bp, Artificial Sequence
  source: /note="Description of Artificial Sequence: Synthetic oligonucleotide"
  source: /note="Description of Combined DNA/RNA Molecule: Synthetic oligonucleotide"
  source: /note="DNA/RNA"
  modified_base (1)..(1): bicyclic nucleic acid (BNA)
  modified_base (2)..(2): bicyclic nucleic acid (BNA)
  modified_base (3)..(3): 5-methyl modified nucleotide
  modified_base (7)..(7): 5-methyl modified nucleotide
  modified_base (8)..(8): 5-methyl modified nucleotide
  modified_base (11)..(11): bicyclic nucleic acid (BNA)
  modified_base (12)..(12): 5-methyl bicyclic nucleic acid
ttcuguccaagc

SEQ ID NO: 20617 - DNA, 11 bp, Artificial Sequence
  source: /note="Description of Artificial Sequence: Synthetic oligonucleotide"
  source: /note="Description of Combined DNA/RNA Molecule: Synthetic oligonucleotide"
  source: /note="DNA/RNA"
  modified_base (1)..(1): bicyclic nucleic acid (BNA)
  modified_base (2)..(2): bicyclic nucleic acid (BNA)
  modified_base (3)..(3): 5-methyl modified nucleotide
  modified_base (7)..(7): 5-methyl modified nucleotide
  modified_base (8)..(8): 5-methyl modified nucleotide
  modified_base (10)..(10): bicyclic nucleic acid (BNA)
  modified_base (11)..(11): bicyclic nucleic acid (BNA)
ttcuguccaag

SEQ ID NO: 20618 - DNA, 10 bp, Artificial Sequence
  source: /note="Description of Artificial Sequence: Synthetic oligonucleotide"
  source: /note="Description of Combined DNA/RNA Molecule: Synthetic oligonucleotide"
  source: /note="DNA/RNA"
  modified_base (1)..(1): bicyclic nucleic acid (BNA)
  modified_base (2)..(2): bicyclic nucleic acid (BNA)
  modified_base (3)..(3): 5-methyl modified nucleotide
  modified_base (7)..(7): 5-methyl modified nucleotide
  modified_base (8)..(8): 5-methyl modified nucleotide
  modified_base (9)..(9): bicyclic nucleic acid (BNA)
  modified_base (10)..(10): bicyclic nucleic acid (BNA)
ttcuguccaa

SEQ ID NO: 20619 - DNA, 9 bp, Artificial Sequence
  source: /note="Description of Artificial Sequence: Synthetic oligonucleotide"
  source: /note="Description of Combined DNA/RNA Molecule: Synthetic oligonucleotide"
  source: /note="DNA/RNA"
  modified_base (1)..(1): bicyclic nucleic acid (BNA)
  modified_base (2)..(2): bicyclic nucleic acid (BNA)
  modified_base (3)..(3): 5-methyl modified nucleotide
  modified_base (7)..(7): 5-methyl modified nucleotide
  modified_base (8)..(8): 5-methyl bicyclic nucleic acid
  modified_base (9)..(9): bicyclic nucleic acid (BNA)
ttcugucca

SEQ ID NO: 20620 - DNA, 8 bp, Artificial Sequence
  source: /note="Description of Artificial Sequence: Synthetic oligonucleotide"
  source: /note="Description of Combined DNA/RNA Molecule: Synthetic oligonucleotide"
  source: /note="DNA/RNA"
  modified_base (1)..(1): bicyclic nucleic acid (BNA)
  modified_base (2)..(2): bicyclic nucleic acid (BNA)
  modified_base (3)..(3): 5-methyl modified nucleotide
  modified_base (7)..(7): 5-methyl bicyclic nucleic acid
  modified_base (8)..(8): 5-methyl bicyclic nucleic acid
ttcugucc

SEQ ID NO: 20621 - DNA, 19 bp, Artificial Sequence
  source: /note="Description of Artificial Sequence: Synthetic oligonucleotide"
  source: /note="Description of Combined DNA/RNA Molecule: Synthetic oligonucleotide"
  source: /note="DNA/RNA"
  modified_base (1)..(1): bicyclic nucleic acid (BNA)
  modified_base (2)..(2): 5-methyl bicyclic nucleic acid
  modified_base (6)..(6): 5-methyl modified nucleotide
  modified_base (7)..(7): 5-methyl modified nucleotide
  modified_base (11)..(11): 5-methyl modified nucleotide
  modified_base (12)..(12): 5-methyl modified nucleotide
  modified_base (13)..(13): 5-methyl modified nucleotide
  modified_base (18)..(18): bicyclic nucleic acid (BNA)
  modified_base (19)..(19): bicyclic nucleic acid (BNA)
tcuguccaagcccgguuga

SEQ ID NO: 20622 - DNA, 18 bp, Artificial Sequence
  source: /note="Description of Artificial Sequence: Synthetic oligonucleotide"
  source: /note="Description of Combined DNA/RNA Molecule: Synthetic oligonucleotide"
  source: /note="DNA/RNA"
  modified_base (1)..(1): bicyclic nucleic acid (BNA)
  modified_base (2)..(2): 5-methyl bicyclic nucleic acid
  modified_base (6)..(6): 5-methyl modified nucleotide
  modified_base (7)..(7): 5-methyl modified nucleotide
  modified_base (11)..(11): 5-methyl modified nucleotide
  modified_base (12)..(12): 5-methyl modified nucleotide
  modified_base (13)..(13): 5-methyl modified nucleotide
  modified_base (17)..(17): bicyclic nucleic acid (BNA)
  modified_base (18)..(18): bicyclic nucleic acid (BNA)
tcuguccaagcccggutg

SEQ ID NO: 20623 - DNA, 17 bp, Artificial Sequence
  source: /note="Description of Artificial Sequence: Synthetic oligonucleotide"
  source: /note="Description of Combined DNA/RNA Molecule: Synthetic oligonucleotide"
  source: /note="DNA/RNA"
  modified_base (1)..(1): bicyclic nucleic acid (BNA)
  modified_base (2)..(2): 5-methyl bicyclic nucleic acid
  modified_base (6)..(6): 5-methyl modified nucleotide
  modified_base (7)..(7): 5-methyl modified nucleotide
  modified_base (11)..(11): 5-methyl modified nucleotide
  modified_base (12)..(12): 5-methyl modified nucleotide
  modified_base (13)..(13): 5-methyl modified nucleotide
  modified_base (16)..(16): bicyclic nucleic acid (BNA)
  modified_base (17)..(17): bicyclic nucleic acid (BNA)
tcuguccaagcccggtt

SEQ ID NO: 20624 - DNA, 16 bp, Artificial Sequence
  source: /note="Description of Artificial Sequence: Synthetic oligonucleotide"
  source: /note="Description of Combined DNA/RNA Molecule: Synthetic oligonucleotide"
  source: /note="DNA/RNA"
  modified_base (1)..(1): bicyclic nucleic acid (BNA)
  modified_base (2)..(2): 5-methyl bicyclic nucleic acid
  modified_base (6)..(6): 5-methyl modified nucleotide
  modified_base (7)..(7): 5-methyl modified nucleotide
  modified_base (11)..(11): 5-methyl modified nucleotide
  modified_base (12)..(12): 5-methyl modified nucleotide
  modified_base (13)..(13): 5-methyl modified nucleotide
  modified_base (15)..(15): bicyclic nucleic acid (BNA)
  modified_base (16)..(16): bicyclic nucleic acid (BNA)
tcuguccaagcccggt

SEQ ID NO: 20625 - DNA, 15 bp, Artificial Sequence
  source: /note="Description of Artificial Sequence: Synthetic oligonucleotide"
  source: /note="Description of Combined DNA/RNA Molecule: Synthetic oligonucleotide"
  source: /note="DNA/RNA"
  modified_base (1)..(1): bicyclic nucleic acid (BNA)
  modified_base (2)..(2): 5-methyl bicyclic nucleic acid
  modified_base (6)..(6): 5-methyl modified nucleotide
  modified_base (7)..(7): 5-methyl modified nucleotide
  modified_base (11)..(11): 5-methyl modified nucleotide
  modified_base (12)..(12): 5-methyl modified nucleotide
  modified_base (13)..(13): 5-methyl modified nucleotide
  modified_base (14)..(14): bicyclic nucleic acid (BNA)
  modified_base (15)..(15): bicyclic nucleic acid (BNA)
tcuguccaagcccgg

SEQ ID NO: 20626 - DNA, 14 bp, Artificial Sequence
  source: /note="Description of Artificial Sequence: Synthetic oligonucleotide"
  source: /note="Description of Combined DNA/RNA Molecule: Synthetic oligonucleotide"
  source: /note="DNA/RNA"
  modified_base (1)..(1): bicyclic nucleic acid (BNA)
  modified_base (2)..(2): 5-methyl bicyclic nucleic acid
  modified_base (6)..(6): 5-methyl modified nucleotide
  modified_base (7)..(7): 5-methyl modified nucleotide
  modified_base (11)..(11): 5-methyl modified nucleotide
  modified_base (12)..(12): 5-methyl modified nucleotide
  modified_base (13)..(13): 5-methyl bicyclic nucleic acid
  modified_base (14)..(14): bicyclic nucleic acid (BNA)
tcuguccaagcccg

SEQ ID NO: 20627 - DNA, 13 bp, Artificial Sequence
  source: /note="Description of Artificial Sequence: Synthetic oligonucleotide"
  source: /note="Description of Combined DNA/RNA Molecule: Synthetic oligonucleotide"
  source: /note="DNA/RNA"
  modified_base (1)..(1): bicyclic nucleic acid (BNA)
  modified_base (2)..(2): 5-methyl bicyclic nucleic acid
  modified_base (6)..(6): 5-methyl modified nucleotide
  modified_base (7)..(7): 5-methyl modified nucleotide
  modified_base (11)..(11): 5-methyl modified nucleotide
  modified_base (12)..(12): 5-methyl bicyclic nucleic acid
  modified_base (13)..(13): 5-methyl bicyclic nucleic acid
tcuguccaagccc

SEQ ID NO: 20628 - DNA, 12 bp, Artificial Sequence
  source: /note="Description of Artificial Sequence: Synthetic oligonucleotide"
  source: /note="Description of Combined DNA/RNA Molecule: Synthetic oligonucleotide"
  source: /note="DNA/RNA"
  modified_base (1)..(1): bicyclic nucleic acid (BNA)
  modified_base (2)..(2): 5-methyl bicyclic nucleic acid
  modified_base (6)..(6): 5-methyl modified nucleotide
  modified_base (7)..(7): 5-methyl modified nucleotide
  modified_base (11)..(11): 5-methyl bicyclic nucleic acid
  modified_base (12)..(12): 5-methyl bicyclic nucleic acid
tcuguccaagcc

SEQ ID NO: 20629 - DNA, 11 bp, Artificial Sequence
  source: /note="Description of Artificial Sequence: Synthetic oligonucleotide"
  source: /note="Description of Combined DNA/RNA Molecule: Synthetic oligonucleotide"
  source: /note="DNA/RNA"
  modified_base (1)..(1): bicyclic nucleic acid (BNA)
  modified_base (2)..(2): 5-methyl bicyclic nucleic acid
  modified_base (6)..(6): 5-methyl modified nucleotide
  modified_base (7)..(7): 5-methyl modified nucleotide
  modified_base (10)..(10): bicyclic nucleic acid (BNA)
  modified_base (11)..(11): 5-methyl bicyclic nucleic acid
tcuguccaagc

SEQ ID NO: 20630 - DNA, 10 bp, Artificial Sequence
  source: /note="Description of Artificial Sequence: Synthetic oligonucleotide"
  source: /note="Description of Combined DNA/RNA Molecule: Synthetic oligonucleotide"
  source: /note="DNA/RNA"
  modified_base (1)..(1): bicyclic nucleic acid (BNA)
  modified_base (2)..(2): 5-methyl bicyclic nucleic acid
  modified_base (6)..(6): 5-methyl modified nucleotide
  modified_base (7)..(7): 5-methyl modified nucleotide
  modified_base (9)..(9): bicyclic nucleic acid (BNA)
  modified_base (10)..(10): bicyclic nucleic acid (BNA)
tcuguccaag

SEQ ID NO: 20631 - DNA, 9 bp, Artificial Sequence
  source: /note="Description of Artificial Sequence: Synthetic oligonucleotide"
  source: /note="Description of Combined DNA/RNA Molecule: Synthetic oligonucleotide"
  source: /note="DNA/RNA"
  modified_base (1)..(1): bicyclic nucleic acid (BNA)
  modified_base (2)..(2): 5-methyl bicyclic nucleic acid
  modified_base (6)..(6): 5-methyl modified nucleotide
  modified_base (7)..(7): 5-methyl modified nucleotide
  modified_base (8)..(8): bicyclic nucleic acid (BNA)
  modified_base (9)..(9): bicyclic nucleic acid (BNA)
tcuguccaa

SEQ ID NO: 20632 - DNA, 8 bp, Artificial Sequence
  source: /note="Description of Artificial Sequence: Synthetic oligonucleotide"
  source: /note="Description of Combined DNA/RNA Molecule: Synthetic oligonucleotide"
  source: /note="DNA/RNA"
  modified_base (1)..(1): bicyclic nucleic acid (BNA)
  modified_base (2)..(2): 5-methyl bicyclic nucleic acid
  modified_base (6)..(6): 5-methyl modified nucleotide
  modified_base (7)..(7): 5-methyl bicyclic nucleic acid
  modified_base (8)..(8): bicyclic nucleic acid (BNA)
tcugucca

SEQ ID NO: 20633 - DNA, 17 bp, Artificial Sequence
  source: /note="Description of Artificial Sequence: Synthetic oligonucleotide"
  source: /note="Description of Combined DNA/RNA Molecule: Synthetic oligonucleotide"
  source: /note="DNA/RNA"
  modified_base (1)..(1): 5-methyl bicyclic nucleic acid
  modified_base (2)..(2): bicyclic nucleic acid (BNA)
  modified_base (5)..(5): 5-methyl modified nucleotide
  modified_base (6)..(6): 5-methyl modified nucleotide
  modified_base (10)..(10): 5-methyl modified nucleotide
  modified_base (11)..(11): 5-methyl modified nucleotide
  modified_base (12)..(12): 5-methyl modified nucleotide
  modified_base (16)..(16): bicyclic nucleic acid (BNA)
  modified_base (17)..(17): bicyclic nucleic acid (BNA)
ctguccaagcccggutg

SEQ ID NO: 20634 - DNA, 16 bp, Artificial Sequence
  source: /note="Description of Artificial Sequence: Synthetic oligonucleotide"
  source: /note="Description of Combined DNA/RNA Molecule: Synthetic oligonucleotide"
  source: /note="DNA/RNA"
  modified_base (1)..(1): 5-methyl bicyclic nucleic acid
  modified_base (2)..(2): bicyclic nucleic acid (BNA)
  modified_base (5)..(5): 5-methyl modified nucleotide
  modified_base (6)..(6): 5-methyl modified nucleotide
  modified_base (10)..(10): 5-methyl modified nucleotide
  modified_base (11)..(11): 5-methyl modified nucleotide
  modified_base (12)..(12): 5-methyl modified nucleotide
  modified_base (15)..(15): bicyclic nucleic acid (BNA)
  modified_base (16)..(16): bicyclic nucleic acid (BNA)
ctguccaagcccggtt

SEQ ID NO: 20635 - DNA, 15 bp, Artificial Sequence
  source: /note="Description of Artificial Sequence: Synthetic oligonucleotide"
  source: /note="Description of Combined DNA/RNA Molecule: Synthetic oligonucleotide"
  source: /note="DNA/RNA"
  modified_base (1)..(1): 5-methyl bicyclic nucleic acid
  modified_base (2)..(2): bicyclic nucleic acid (BNA)
  modified_base (5)..(5): 5-methyl modified nucleotide
  modified_base (6)..(6): 5-methyl modified nucleotide
  modified_base (10)..(10): 5-methyl modified nucleotide
  modified_base (11)..(11): 5-methyl modified nucleotide
  modified_base (12)..(12): 5-methyl modified nucleotide
  modified_base (14)..(14): bicyclic nucleic acid (BNA)
  modified_base (15)..(15): bicyclic nucleic acid (BNA)
ctguccaagcccggt

SEQ ID NO: 20636 - DNA, 14 bp, Artificial Sequence
  source: /note="Description of Artificial Sequence: Synthetic oligonucleotide"
  source: /note="Description of Combined DNA/RNA Molecule: Synthetic oligonucleotide"
  source: /note="DNA/RNA"
  modified_base (1)..(1): 5-methyl bicyclic nucleic acid
  modified_base (2)..(2): bicyclic nucleic acid (BNA)
  modified_base (5)..(5): 5-methyl modified nucleotide
  modified_base (6)..(6): 5-methyl modified nucleotide
  modified_base (10)..(10): 5-methyl modified nucleotide
  modified_base (11)..(11): 5-methyl modified nucleotide
  modified_base (12)..(12): 5-methyl modified nucleotide
  modified_base (13)..(13): bicyclic nucleic acid (BNA)
  modified_base (14)..(14): bicyclic nucleic acid (BNA)
ctguccaagcccgg

SEQ ID NO: 20637 - DNA, 13 bp, Artificial Sequence
  source: /note="Description of Artificial Sequence: Synthetic oligonucleotide"
  source: /note="Description of Combined DNA/RNA Molecule: Synthetic oligonucleotide"
  source: /note="DNA/RNA"
  modified_base (1)..(1): 5-methyl bicyclic nucleic acid
  modified_base (2)..(2): bicyclic nucleic acid (BNA)
  modified_base (5)..(5): 5-methyl modified nucleotide
  modified_base (6)..(6): 5-methyl modified nucleotide
  modified_base (10)..(10): 5-methyl modified nucleotide
  modified_base (11)..(11): 5-methyl modified nucleotide
  modified_base (12)..(12): 5-methyl bicyclic nucleic acid
  modified_base (13)..(13): bicyclic nucleic acid (BNA)
ctguccaagcccg

SEQ ID NO: 20638 - DNA, 12 bp, Artificial Sequence
  source: /note="Description of Artificial Sequence: Synthetic oligonucleotide"
  source: /note="Description of Combined DNA/RNA Molecule: Synthetic oligonucleotide"
  source: /note="DNA/RNA"
  modified_base (1)..(1): 5-methyl bicyclic nucleic acid
  modified_base (2)..(2): bicyclic nucleic acid (BNA)
  modified_base (5)..(5): 5-methyl modified nucleotide
  modified_base (6)..(6): 5-methyl modified nucleotide
  modified_base (10)..(10): 5-methyl modified nucleotide
  modified_base (11)..(11): 5-methyl bicyclic nucleic acid
  modified_base (12)..(12): 5-methyl bicyclic nucleic acid
ctguccaagccc

SEQ ID NO: 20639 - DNA, 11 bp, Artificial Sequence
  source: /note="Description of Artificial Sequence: Synthetic oligonucleotide"
  source: /note="Description of Combined DNA/RNA Molecule: Synthetic oligonucleotide"
  source: /note="DNA/RNA"
  modified_base (1)..(1): 5-methyl bicyclic nucleic acid
  modified_base (2)..(2): bicyclic nucleic acid (BNA)
  modified_base (5)..(5): 5-methyl modified nucleotide
  modified_base (6)..(6): 5-methyl modified nucleotide
  modified_base (10)..(10): 5-methyl bicyclic nucleic acid
  modified_base (11)..(11): 5-methyl bicyclic nucleic acid
ctguccaagcc

SEQ ID NO: 20640 - DNA, 10 bp, Artificial Sequence
  source: /note="Description of Artificial Sequence: Synthetic oligonucleotide"
  source: /note="Description of Combined DNA/RNA Molecule: Synthetic oligonucleotide"
  source: /note="DNA/RNA"
  modified_base (1)..(1): 5-methyl bicyclic nucleic acid
  modified_base (2)..(2): bicyclic nucleic acid (BNA)
  modified_base (5)..(5): 5-methyl modified nucleotide
  modified_base (6)..(6): 5-methyl modified nucleotide
  modified_base (9)..(9): bicyclic nucleic acid (BNA)
  modified_base (10)..(10): 5-methyl bicyclic nucleic acid
ctguccaagc

SEQ ID NO: 20641 - DNA, 9 bp, Artificial Sequence
  source: /note="Description of Artificial Sequence: Synthetic oligonucleotide"
  source: /note="Description of Combined DNA/RNA Molecule: Synthetic oligonucleotide"
  source: /note="DNA/RNA"
  modified_base (1)..(1): 5-methyl bicyclic nucleic acid
  modified_base (2)..(2): bicyclic nucleic acid (BNA)
  modified_base (5)..(5): 5-methyl modified nucleotide
  modified_base (6)..(6): 5-methyl modified nucleotide
  modified_base (8)..(8): bicyclic nucleic acid (BNA)
  modified_base (9)..(9): bicyclic nucleic acid (BNA)
ctguccaag

SEQ ID NO: 20642 - DNA, 8 bp, Artificial Sequence
  source: /note="Description of Artificial Sequence: Synthetic oligonucleotide"
  source: /note="Description of Combined DNA/RNA Molecule: Synthetic oligonucleotide"
  source: /note="DNA/RNA"
  modified_base (1)..(1): 5-methyl bicyclic nucleic acid
  modified_base (2)..(2): bicyclic nucleic acid (BNA)
  modified_base (5)..(5): 5-methyl modified nucleotide
  modified_base (6)..(6): 5-methyl modified nucleotide
  modified_base (7)..(7): bicyclic nucleic acid (BNA)
  modified_base (8)..(8): bicyclic nucleic acid (BNA)
ctguccaa

SEQ ID NO: 20643 - DNA, 20 bp, Artificial Sequence
  source: /note="Description of Artificial Sequence: Synthetic oligonucleotide"
  source: /note="Description of Combined DNA/RNA Molecule: Synthetic oligonucleotide"
  source: /note="DNA/RNA"
  modified_base (1)..(1): bicyclic nucleic acid (BNA)
  modified_base (2)..(2): bicyclic nucleic acid (BNA)
  modified_base (4)..(4): 5-methyl modified nucleotide
  modified_base (8)..(8): 5-methyl modified nucleotide
  modified_base (9)..(9): 5-methyl modified nucleotide
  modified_base (13)..(13): 5-methyl modified nucleotide
  modified_base (14)..(14): 5-methyl modified nucleotide
  modified_base (15)..(15): 5-methyl modified nucleotide
  modified_base (19)..(19): bicyclic nucleic acid (BNA)
  modified_base (20)..(20): bicyclic nucleic acid (BNA)
gtucuguccaagcccggutg

SEQ ID NO: 20644 - DNA, 19 bp, Artificial Sequence
  source: /note="Description of Artificial Sequence: Synthetic oligonucleotide"
  source: /note="Description of Combined DNA/RNA Molecule: Synthetic oligonucleotide"
  source: /note="DNA/RNA"
  modified_base (1)..(1): bicyclic nucleic acid (BNA)
  modified_base (2)..(2): bicyclic nucleic acid (BNA)
  modified_base (4)..(4): 5-methyl modified nucleotide
  modified_base (8)..(8): 5-methyl modified nucleotide
  modified_base (9)..(9): 5-methyl modified nucleotide
  modified_base (13)..(13): 5-methyl modified nucleotide
  modified_base (14)..(14): 5-methyl modified nucleotide
  modified_base (15)..(15): 5-methyl modified nucleotide
  modified_base (18)..(18): bicyclic nucleic acid (BNA)
  modified_base (19)..(19): bicyclic nucleic acid (BNA)
gtucuguccaagcccggtt

SEQ ID NO: 20645 - DNA, 18 bp, Artificial Sequence
  source: /note="Description of Artificial Sequence: Synthetic oligonucleotide"
  source: /note="Description of Combined DNA/RNA Molecule: Synthetic oligonucleotide"
  source: /note="DNA/RNA"
  modified_base (1)..(1): bicyclic nucleic acid (BNA)
  modified_base (2)..(2): bicyclic nucleic acid (BNA)
  modified_base (4)..(4): 5-methyl modified nucleotide
  modified_base (8)..(8): 5-methyl modified nucleotide
  modified_base (9)..(9): 5-methyl modified nucleotide
  modified_base (13)..(13): 5-methyl modified nucleotide
  modified_base (14)..(14): 5-methyl modified nucleotide
  modified_base (15)..(15): 5-methyl modified nucleotide
  modified_base (17)..(17): bicyclic nucleic acid (BNA)
  modified_base (18)..(18): bicyclic nucleic acid (BNA)
gtucuguccaagcccggt

SEQ ID NO: 20646 - DNA, 17 bp, Artificial Sequence
  source: /note="Description of Artificial Sequence: Synthetic oligonucleotide"
  source: /note="Description of Combined DNA/RNA Molecule: Synthetic oligonucleotide"
  source: /note="DNA/RNA"
  modified_base (1)..(1): bicyclic nucleic acid (BNA)
  modified_base (2)..(2): bicyclic nucleic acid (BNA)
  modified_base (4)..(4): 5-methyl modified nucleotide
  modified_base (8)..(8): 5-methyl modified nucleotide
  modified_base (9)..(9): 5-methyl modified nucleotide
  modified_base (13)..(13): 5-methyl modified nucleotide
  modified_base (14)..(14): 5-methyl modified nucleotide
  modified_base (15)..(15): 5-methyl modified nucleotide
  modified_base (16)..(16): bicyclic nucleic acid (BNA)
  modified_base (17)..(17): bicyclic nucleic acid (BNA)
gtucuguccaagcccgg

SEQ ID NO: 20647 - DNA, 16 bp, Artificial Sequence
  source: /note="Description of Artificial Sequence: Synthetic oligonucleotide"
  source: /note="Description of Combined DNA/RNA Molecule: Synthetic oligonucleotide"
  source: /note="DNA/RNA"
  modified_base (1)..(1): bicyclic nucleic acid (BNA)
  modified_base (2)..(2): bicyclic nucleic acid (BNA)
  modified_base (4)..(4): 5-methyl modified nucleotide
  modified_base (8)..(8): 5-methyl modified nucleotide
  modified_base (9)..(9): 5-methyl modified nucleotide
  modified_base (13)..(13): 5-methyl modified nucleotide
  modified_base (14)..(14): 5-methyl modified nucleotide
  modified_base (15)..(15): 5-methyl bicyclic nucleic acid
  modified_base (16)..(16): bicyclic nucleic acid (BNA)
gtucuguccaagcccg

SEQ ID NO: 20648 - DNA, 15 bp, Artificial Sequence
  source: /note="Description of Artificial Sequence: Synthetic oligonucleotide"
  source: /note="Description of Combined DNA/RNA Molecule: Synthetic oligonucleotide"
  source: /note="DNA/RNA"
  modified_base (1)..(1): bicyclic nucleic acid (BNA)
  modified_base (2)..(2): bicyclic nucleic acid (BNA)
  modified_base (4)..(4): 5-methyl modified nucleotide
  modified_base (8)..(8): 5-methyl modified nucleotide
  modified_base (9)..(9): 5-methyl modified nucleotide
  modified_base (13)..(13): 5-methyl modified nucleotide
  modified_base (14)..(14): 5-methyl bicyclic nucleic acid
  modified_base (15)..(15): 5-methyl bicyclic nucleic acid
gtucuguccaagccc

SEQ ID NO: 20649 - DNA, 14 bp, Artificial Sequence
  source: /note="Description of Artificial Sequence: Synthetic oligonucleotide"
  source: /note="Description of Combined DNA/RNA Molecule: Synthetic oligonucleotide"
  source: /note="DNA/RNA"
  modified_base (1)..(1): bicyclic nucleic acid (BNA)
  modified_base (2)..(2): bicyclic nucleic acid (BNA)
  modified_base (4)..(4): 5-methyl modified nucleotide
  modified_base (8)..(8): 5-methyl modified nucleotide
  modified_base (9)..(9): 5-methyl modified nucleotide
  modified_base (13)..(13): 5-methyl bicyclic nucleic acid
  modified_base (14)..(14): 5-methyl bicyclic nucleic acid
gtucuguccaagcc

SEQ ID NO: 20650 - DNA, 13 bp, Artificial Sequence
  source: /note="Description of Artificial Sequence: Synthetic oligonucleotide"
  source: /note="Description of Combined DNA/RNA Molecule: Synthetic oligonucleotide"
  source: /note="DNA/RNA"
  modified_base (1)..(1): bicyclic nucleic acid (BNA)
  modified_base (2)..(2): bicyclic nucleic acid (BNA)
  modified_base (4)..(4): 5-methyl modified nucleotide
  modified_base (8)..(8): 5-methyl modified nucleotide
  modified_base (9)..(9): 5-methyl modified nucleotide
  modified_base (12)..(12): bicyclic nucleic acid (BNA)
  modified_base (13)..(13): 5-methyl bicyclic nucleic acid
gtucuguccaagc

SEQ ID NO: 20651 - DNA, 12 bp, Artificial Sequence
  source: /note="Description of Artificial Sequence: Synthetic oligonucleotide"
  source: /note="Description of Combined DNA/RNA Molecule: Synthetic oligonucleotide"
  source: /note="DNA/RNA"
  modified_base (1)..(1): bicyclic nucleic acid (BNA)
  modified_base (2)..(2): bicyclic nucleic acid (BNA)
  modified_base (4)..(4): 5-methyl modified nucleotide
  modified_base (8)..(8): 5-methyl modified nucleotide
  modified_base (9)..(9): 5-methyl modified nucleotide
  modified_base (11)..(11): bicyclic nucleic acid (BNA)
  modified_base (12)..(12): bicyclic nucleic acid (BNA)
gtucuguccaag

SEQ ID NO: 20652 - DNA, 11 bp, Artificial Sequence
  source: /note="Description of Artificial Sequence: Synthetic oligonucleotide"
  source: /note="Description of Combined DNA/RNA Molecule: Synthetic oligonucleotide"
  source: /note="DNA/RNA"
  modified_base (1)..(1): bicyclic nucleic acid (BNA)
  modified_base (2)..(2): bicyclic nucleic acid (BNA)
  modified_base (4)..(4): 5-methyl modified nucleotide
  modified_base (8)..(8): 5-methyl modified nucleotide
  modified_base (9)..(9): 5-methyl modified nucleotide
  modified_base (10)..(10): bicyclic nucleic acid (BNA)
  modified_base (11)..(11): bicyclic nucleic acid (BNA)
gtucuguccaa

SEQ ID NO: 20653 - DNA, 10 bp, Artificial Sequence
  source: /note="Description of Artificial Sequence: Synthetic oligonucleotide"
  source: /note="Description of Combined DNA/RNA Molecule: Synthetic oligonucleotide"
  source: /note="DNA/RNA"
  modified_base (1)..(1): bicyclic nucleic acid (BNA)
  modified_base (2)..(2): bicyclic nucleic acid (BNA)
  modified_base (4)..(4): 5-methyl modified nucleotide
  modified_base (8)..(8): 5-methyl modified nucleotide
  modified_base (9)..(9): 5-methyl bicyclic nucleic acid
  modified_base (10)..(10): bicyclic nucleic acid (BNA)
gtucugucca

SEQ ID NO: 20654 - DNA, 9 bp, Artificial Sequence
  source: /note="Description of Artificial Sequence: Synthetic oligonucleotide"
  source: /note="Description of Combined DNA/RNA Molecule: Synthetic oligonucleotide"
  source: /note="DNA/RNA"
  modified_base (1)..(1): bicyclic nucleic acid (BNA)
  modified_base (2)..(2): bicyclic nucleic acid (BNA)
  modified_base (4)..(4): 5-methyl modified nucleotide
  modified_base (8)..(8): 5-methyl bicyclic nucleic acid
  modified_base (9)..(9): 5-methyl bicyclic nucleic acid
gtucugucc

SEQ ID NO: 20655 - DNA, 8 bp, Artificial Sequence
  source: /note="Description of Artificial Sequence: Synthetic oligonucleotide"
  source: /note="Description of Combined DNA/RNA Molecule: Synthetic oligonucleotide"
  source: /note="DNA/RNA"
  modified_base (1)..(1): bicyclic nucleic acid (BNA)
  modified_base (2)..(2): bicyclic nucleic acid (BNA)
  modified_base (4)..(4): 5-methyl modified nucleotide
  modified_base (7)..(7): bicyclic nucleic acid (BNA)
  modified_base (8)..(8): 5-methyl bicyclic nucleic acid
gtucugtc

SEQ ID NO: 20656 - DNA, 20 bp, Artificial Sequence
  source: /note="Description of Artificial Sequence: Synthetic oligonucleotide"
  source: /note="Description of Combined DNA/RNA Molecule: Synthetic oligonucleotide"
  source: /note="DNA/RNA"
  modified_base (1)..(1): bicyclic nucleic acid (BNA)
  modified_base (2)..(2): bicyclic nucleic acid (BNA)
  modified_base (5)..(5): 5-methyl modified nucleotide
  modified_base (9)..(9): 5-methyl modified nucleotide
  modified_base (10)..(10): 5-methyl modified nucleotide
  modified_base (14)..(14): 5-methyl modified nucleotide
  modified_base (15)..(15): 5-methyl modified nucleotide
  modified_base (16)..(16): 5-methyl modified nucleotide
  modified_base (19)..(19): bicyclic nucleic acid (BNA)
  modified_base (20)..(20): bicyclic nucleic acid (BNA)
aguucuguccaagcccggtt

SEQ ID NO: 20657 - DNA, 19 bp, Artificial Sequence
  source: /note="Description of Artificial Sequence: Synthetic oligonucleotide"
  source: /note="Description of Combined DNA/RNA Molecule: Synthetic oligonucleotide"
  source: /note="DNA/RNA"
  modified_base (1)..(1): bicyclic nucleic acid (BNA)
  modified_base (2)..(2): bicyclic nucleic acid (BNA)
  modified_base (5)..(5): 5-methyl modified nucleotide
  modified_base (9)..(9): 5-methyl modified nucleotide
  modified_base (10)..(10): 5-methyl modified nucleotide
  modified_base (14)..(14): 5-methyl modified nucleotide
  modified_base (15)..(15): 5-methyl modified nucleotide
  modified_base (16)..(16): 5-methyl modified nucleotide
  modified_base (18)..(18): bicyclic nucleic acid (BNA)
  modified_base (19)..(19): bicyclic nucleic acid (BNA)
aguucuguccaagcccggt

SEQ ID NO: 20658 - RNA, 18 nt, Artificial Sequence
  source: /note="Description of Artificial Sequence: Synthetic oligonucleotide"
  source: /note="RNA"
  modified_base (1)..(1): bicyclic nucleic acid (BNA)
  modified_base (2)..(2): bicyclic nucleic acid (BNA)
  modified_base (5)..(5): 5-methyl modified nucleotide
  modified_base (9)..(9): 5-methyl modified nucleotide
  modified_base (10)..(10): 5-methyl modified nucleotide
  modified_base (14)..(14): 5-methyl modified nucleotide
  modified_base (15)..(15): 5-methyl modified nucleotide
  modified_base (16)..(16): 5-methyl modified nucleotide
  modified_base (17)..(17): bicyclic nucleic acid (BNA)
  modified_base (18)..(18): bicyclic nucleic acid (BNA)
aguucuguccaagcccgg

SEQ ID NO: 20659 - RNA, 17 nt, Artificial Sequence
  source: /note="Description of Artificial Sequence: Synthetic oligonucleotide"
  source: /note="RNA"
  modified_base (1)..(1): bicyclic nucleic acid (BNA)
  modified_base (2)..(2): bicyclic nucleic acid (BNA)
  modified_base (5)..(5): 5-methyl modified nucleotide
  modified_base (9)..(9): 5-methyl modified nucleotide
  modified_base (10)..(10): 5-methyl modified nucleotide
  modified_base (14)..(14): 5-methyl modified nucleotide
  modified_base (15)..(15): 5-methyl modified nucleotide
  modified_base (16)..(16): 5-methyl bicyclic nucleic acid
  modified_base (17)..(17): bicyclic nucleic acid (BNA)
aguucuguccaagcccg

SEQ ID NO: 20660 - RNA, 16 nt, Artificial Sequence
  source: /note="Description of Artificial Sequence: Synthetic oligonucleotide"
  source: /note="RNA"
  modified_base (1)..(1): bicyclic nucleic acid (BNA)
  modified_base (2)..(2): bicyclic nucleic acid (BNA)
  modified_base (5)..(5): 5-methyl modified nucleotide
  modified_base (9)..(9): 5-methyl modified nucleotide
  modified_base (10)..(10): 5-methyl modified nucleotide
  modified_base (14)..(14): 5-methyl modified nucleotide
  modified_base (15)..(15): 5-methyl bicyclic nucleic acid
  modified_base (16)..(16): 5-methyl bicyclic nucleic acid
aguucuguccaagccc

SEQ ID NO: 20661 - RNA, 15 nt, Artificial Sequence
  source: /note="Description of Artificial Sequence: Synthetic oligonucleotide"
  source: /note="RNA"
  modified_base (1)..(1): bicyclic nucleic acid (BNA)
  modified_base (2)..(2): bicyclic nucleic acid (BNA)
  modified_base (5)..(5): 5-methyl modified nucleotide
  modified_base (9)..(9): 5-methyl modified nucleotide
  modified_base (10)..(10): 5-methyl modified nucleotide
  modified_base (14)..(14): 5-methyl bicyclic nucleic acid
  modified_base (15)..(15): 5-methyl bicyclic nucleic acid
aguucuguccaagcc

SEQ ID NO: 20662 - RNA, 14 nt, Artificial Sequence
  source: /note="Description of Artificial Sequence: Synthetic oligonucleotide"
  source: /note="RNA"
  modified_base (1)..(1): bicyclic nucleic acid (BNA)
  modified_base (2)..(2): bicyclic nucleic acid (BNA)
  modified_base (5)..(5): 5-methyl modified nucleotide
  modified_base (9)..(9): 5-methyl modified nucleotide
  modified_base (10)..(10): 5-methyl modified nucleotide
  modified_base (13)..(13): bicyclic nucleic acid (BNA)
  modified_base (14)..(14): 5-methyl bicyclic nucleic acid
aguucuguccaagc

SEQ ID NO: 20663 - RNA, 13 nt, Artificial Sequence
  source: /note="Description of Artificial Sequence: Synthetic oligonucleotide"
  source: /note="RNA"
  modified_base (1)..(1): bicyclic nucleic acid (BNA)
  modified_base (2)..(2): bicyclic nucleic acid (BNA)
  modified_base (5)..(5): 5-methyl modified nucleotide
  modified_base (9)..(9): 5-methyl modified nucleotide
  modified_base (10)..(10): 5-methyl modified nucleotide
  modified_base (12)..(12): bicyclic nucleic acid (BNA)
  modified_base (13)..(13): bicyclic nucleic acid (BNA)
aguucuguccaag

SEQ ID NO: 20664 - RNA, 12 nt, Artificial Sequence
  source: /note="Description of Artificial Sequence: Synthetic oligonucleotide"
  source: /note="RNA"
  modified_base (1)..(1): bicyclic nucleic acid (BNA)
  modified_base (2)..(2): bicyclic nucleic acid (BNA)
  modified_base (5)..(5): 5-methyl modified nucleotide
  modified_base (9)..(9): 5-methyl modified nucleotide
  modified_base (10)..(10): 5-methyl modified nucleotide
  modified_base (11)..(11): bicyclic nucleic acid (BNA)
  modified_base (12)..(12): bicyclic nucleic acid (BNA)
aguucuguccaa

SEQ ID NO: 20665 - RNA, 11 nt, Artificial Sequence
  source: /note="Description of Artificial Sequence: Synthetic oligonucleotide"
  source: /note="RNA"
  modified_base (1)..(1): bicyclic nucleic acid (BNA)
  modified_base (2)..(2): bicyclic nucleic acid (BNA)
  modified_base (5)..(5): 5-methyl modified nucleotide
  modified_base (9)..(9): 5-methyl modified nucleotide
  modified_base (10)..(10): 5-methyl bicyclic nucleic acid
  modified_base (11)..(11): bicyclic nucleic acid (BNA)
aguucugucca

SEQ ID NO: 20666 - RNA, 10 nt, Artificial Sequence
  source: /note="Description of Artificial Sequence: Synthetic oligonucleotide"
  source: /note="RNA"
  modified_base (1)..(1): bicyclic nucleic acid (BNA)
  modified_base (2)..(2): bicyclic nucleic acid (BNA)
  modified_base (5)..(5): 5-methyl modified nucleotide
  modified_base (9)..(9): 5-methyl bicyclic nucleic acid
  modified_base (10)..(10): 5-methyl bicyclic nucleic acid
aguucugucc

SEQ ID NO: 20667 - DNA, 9 bp, Artificial Sequence
  source: /note="Description of Artificial Sequence: Synthetic oligonucleotide"
  source: /note="Description of Combined DNA/RNA Molecule: Synthetic oligonucleotide"
  source: /note="DNA/RNA"
  modified_base (1)..(1): bicyclic nucleic acid (BNA)
  modified_base (2)..(2): bicyclic nucleic acid (BNA)
  modified_base (5)..(5): 5-methyl modified nucleotide
  modified_base (8)..(8): bicyclic nucleic acid (BNA)
  modified_base (9)..(9): 5-methyl bicyclic nucleic acid
aguucugtc

SEQ ID NO: 20668 - DNA, 8 bp, Artificial Sequence
  source: /note="Description of Artificial Sequence: Synthetic oligonucleotide"
  source: /note="Description of Combined DNA/RNA Molecule: Synthetic oligonucleotide"
  source: /note="DNA/RNA"
  modified_base (1)..(1): bicyclic nucleic acid (BNA)
  modified_base (2)..(2): bicyclic nucleic acid (BNA)
  modified_base (5)..(5): 5-methyl modified nucleotide
  modified_base (7)..(7): bicyclic nucleic acid (BNA)
  modified_base (8)..(8): bicyclic nucleic acid (BNA)
aguucugt

SEQ ID NO: 20669 - DNA, 20 bp, Artificial Sequence
  source: /note="Description of Artificial Sequence: Synthetic oligonucleotide"
  source: /note="Description of Combined DNA/RNA Molecule: Synthetic oligonucleotide"
  source: /note="DNA/RNA"
  modified_base (1)..(1): bicyclic nucleic acid (BNA)
  modified_base (2)..(2): bicyclic nucleic acid (BNA)
  modified_base (6)..(6): 5-methyl modified nucleotide
  modified_base (10)..(10): 5-methyl modified nucleotide
  modified_base (11)..(11): 5-methyl modified nucleotide
  modified_base (15)..(15): 5-methyl modified nucleotide
  modified_base (16)..(16): 5-methyl modified nucleotide
  modified_base (17)..(17): 5-methyl modified nucleotide
  modified_base (19)..(19): bicyclic nucleic acid (BNA)
  modified_base (20)..(20): bicyclic nucleic acid (BNA)
aaguucuguccaagcccggt

SEQ ID NO: 20670 - RNA, 19 nt, Artificial Sequence
  source: /note="Description of Artificial Sequence: Synthetic oligonucleotide"
  source: /note="RNA"
  modified_base (1)..(1): bicyclic nucleic acid (BNA)
  modified_base (2)..(2): bicyclic nucleic acid (BNA)
  modified_base (6)..(6): 5-methyl modified nucleotide
  modified_base (10)..(10): 5-methyl modified nucleotide
  modified_base (11)..(11): 5-methyl modified nucleotide
  modified_base (15)..(15): 5-methyl modified nucleotide
  modified_base (16)..(16): 5-methyl modified nucleotide
  modified_base (17)..(17): 5-methyl modified nucleotide
  modified_base (18)..(18): bicyclic nucleic acid (BNA)
  modified_base (19)..(19): bicyclic nucleic acid (BNA)
aaguucuguccaagcccgg

SEQ ID NO: 20671 - RNA, 18 nt, Artificial Sequence
  source: /note="Description of Artificial Sequence: Synthetic oligonucleotide"
  source: /note="RNA"
  modified_base (1)..(1): bicyclic nucleic acid (BNA)
  modified_base (2)..(2): bicyclic nucleic acid (BNA)
  modified_base (6)..(6): 5-methyl modified nucleotide
  modified_base (10)..(10): 5-methyl modified nucleotide
  modified_base (11)..(11): 5-methyl modified nucleotide
  modified_base (15)..(15): 5-methyl modified nucleotide
  modified_base (16)..(16): 5-methyl modified nucleotide
  modified_base (17)..(17): 5-methyl bicyclic nucleic acid
  modified_base (18)..(18): bicyclic nucleic acid (BNA)
aaguucuguccaagcccg

SEQ ID NO: 20672 - RNA, 17 nt, Artificial Sequence
  source: /note="Description of Artificial Sequence: Synthetic oligonucleotide"
  source: /note="RNA"
  modified_base (1)..(1): bicyclic nucleic acid (BNA)
  modified_base (2)..(2): bicyclic nucleic acid (BNA)
  modified_base (6)..(6): 5-methyl modified nucleotide
  modified_base (10)..(10): 5-methyl modified nucleotide
  modified_base (11)..(11): 5-methyl modified nucleotide
  modified_base (15)..(15): 5-methyl modified nucleotide
  modified_base (16)..(16): 5-methyl bicyclic nucleic acid
  modified_base (17)..(17): 5-methyl bicyclic nucleic acid
aaguucuguccaagccc

SEQ ID NO: 20673 - RNA, 16 nt, Artificial Sequence
  source: /note="Description of Artificial Sequence: Synthetic oligonucleotide"
  source: /note="RNA"
  modified_base (1)..(1): bicyclic nucleic acid (BNA)
  modified_base (2)..(2): bicyclic nucleic acid (BNA)
  modified_base (6)..(6): 5-methyl modified nucleotide
  modified_base (10)..(10): 5-methyl modified nucleotide
  modified_base (11)..(11): 5-methyl modified nucleotide
  modified_base (15)..(15): 5-methyl bicyclic nucleic acid
  modified_base (16)..(16): 5-methyl bicyclic nucleic acid
aaguucuguccaagcc

SEQ ID NO: 20674 - RNA, 15 nt, Artificial Sequence
  source: /note="Description of Artificial Sequence: Synthetic oligonucleotide"
  source: /note="RNA"
  modified_base (1)..(1): bicyclic nucleic acid (BNA)
  modified_base (2)..(2): bicyclic nucleic acid (BNA)
  modified_base (6)..(6): 5-methyl modified nucleotide
  modified_base (10)..(10): 5-methyl modified nucleotide
  modified_base (11)..(11): 5-methyl modified nucleotide
  modified_base (14)..(14): bicyclic nucleic acid (BNA)
  modified_base (15)..(15): 5-methyl bicyclic nucleic acid
aaguucuguccaagc

SEQ ID NO: 20675 - RNA, 14 nt, Artificial Sequence
  source: /note="Description of Artificial Sequence: Synthetic oligonucleotide"
  source: /note="RNA"
  modified_base (1)..(1): bicyclic nucleic acid (BNA)
  modified_base (2)..(2): bicyclic nucleic acid (BNA)
  modified_base (6)..(6): 5-methyl modified nucleotide
  modified_base (10)..(10): 5-methyl modified nucleotide
  modified_base (11)..(11): 5-methyl modified nucleotide
  modified_base (13)..(13): bicyclic nucleic acid (BNA)
  modified_base (14)..(14): bicyclic nucleic acid (BNA)
aaguucuguccaag

SEQ ID NO: 20676 - RNA, 13 nt, Artificial Sequence
  source: /note="Description of Artificial Sequence: Synthetic oligonucleotide"
  source: /note="RNA"
  modified_base (1)..(1): bicyclic nucleic acid (BNA)
  modified_base (2)..(2): bicyclic nucleic acid (BNA)
  modified_base (6)..(6): 5-methyl modified nucleotide
  modified_base (10)..(10): 5-methyl modified nucleotide
  modified_base (11)..(11): 5-methyl modified nucleotide
  modified_base (12)..(12): bicyclic nucleic acid (BNA)
  modified_base (13)..(13): bicyclic nucleic acid (BNA)
aaguucuguccaa

SEQ ID NO: 20677 - RNA, 12 nt, Artificial Sequence
  source: /note="Description of Artificial Sequence: Synthetic oligonucleotide"
  source: /note="RNA"
  modified_base (1)..(1): bicyclic nucleic acid (BNA)
  modified_base (2)..(2): bicyclic nucleic acid (BNA)
  modified_base (6)..(6): 5-methyl modified nucleotide
  modified_base (10)..(10): 5-methyl modified nucleotide
  modified_base (11)..(11): 5-methyl bicyclic nucleic acid
  modified_base (12)..(12): bicyclic nucleic acid (BNA)
aaguucugucca

SEQ ID NO: 20678 - RNA, 11 nt, Artificial Sequence
  source: /note="Description of Artificial Sequence: Synthetic oligonucleotide"
  source: /note="RNA"
  modified_base (1)..(1): bicyclic nucleic acid (BNA)
  modified_base (2)..(2): bicyclic nucleic acid (BNA)
  modified_base (6)..(6): 5-methyl modified nucleotide
  modified_base (10)..(10): 5-methyl bicyclic nucleic acid
  modified_base (11)..(11): 5-methyl bicyclic nucleic acid
aaguucugucc

SEQ ID NO: 20679 - DNA, 10 bp, Artificial Sequence
  source: /note="Description of Artificial Sequence: Synthetic oligonucleotide"
  source: /note="Description of Combined DNA/RNA Molecule: Synthetic oligonucleotide"
  source: /note="DNA/RNA"
  modified_base (1)..(1): bicyclic nucleic acid (BNA)
  modified_base (2)..(2): bicyclic nucleic acid (BNA)
  modified_base (6)..(6): 5-methyl modified nucleotide
  modified_base (9)..(9): bicyclic nucleic acid (BNA)
  modified_base (10)..(10): 5-methyl bicyclic nucleic acid
aaguucugtc

SEQ ID NO: 20680 - DNA, 9 bp, Artificial Sequence
  source: /note="Description of Artificial Sequence: Synthetic oligonucleotide"
  source: /note="Description of Combined DNA/RNA Molecule: Synthetic oligonucleotide"
  source: /note="DNA/RNA"
  modified_base (1)..(1): bicyclic nucleic acid (BNA)
  modified_base (2)..(2): bicyclic nucleic acid (BNA)
  modified_base (6)..(6): 5-methyl modified nucleotide
  modified_base (8)..(8): bicyclic nucleic acid (BNA)
  modified_base (9)..(9): bicyclic nucleic acid (BNA)
aaguucugt

SEQ ID NO: 20681 - DNA, 8 bp, Artificial Sequence
  source: /note="Description of Artificial Sequence: Synthetic oligonucleotide"
  source: /note="Description of Combined DNA/RNA Molecule: Synthetic oligonucleotide"
  source: /note="DNA/RNA"
  modified_base (1)..(1): bicyclic nucleic acid (BNA)
  modified_base (2)..(2): bicyclic nucleic acid (BNA)
  modified_base (6)..(6): 5-methyl modified nucleotide
  modified_base (7)..(7): bicyclic nucleic acid (BNA)
  modified_base (8)..(8): bicyclic nucleic acid (BNA)
aaguuctg

SEQ ID NO: 20682 - DNA, 20 bp, Artificial Sequence
  source: /note="Description of Artificial Sequence: Synthetic oligonucleotide"
  source: /note="Description of Combined DNA/RNA Molecule: Synthetic oligonucleotide"
  source: /note="DNA/RNA"
  modified_base (1)..(1): bicyclic nucleic acid (BNA)
  modified_base (2)..(2): bicyclic nucleic acid (BNA)
  modified_base (7)..(7): 5-methyl modified nucleotide
  modified_base (11)..(11): 5-methyl modified nucleotide
  modified_base (12)..(12): 5-methyl modified nucleotide
  modified_base (16)..(16): 5-methyl modified nucleotide
  modified_base (17)..(17): 5-methyl modified nucleotide
  modified_base (18)..(18): 5-methyl modified nucleotide
  modified_base (19)..(19): bicyclic nucleic acid (BNA)
  modified_base (20)..(20): bicyclic nucleic acid (BNA)
taaguucuguccaagcccgg

SEQ ID NO: 20683 - DNA, 19 bp, Artificial Sequence
  source: /note="Description of Artificial Sequence: Synthetic oligonucleotide"
  source: /note="Description of Combined DNA/RNA Molecule: Synthetic oligonucleotide"
  source: /note="DNA/RNA"
  modified_base (1)..(1): bicyclic nucleic acid (BNA)
  modified_base (2)..(2): bicyclic nucleic acid (BNA)
  modified_base (7)..(7): 5-methyl modified nucleotide
  modified_base (11)..(11): 5-methyl modified nucleotide
  modified_base (12)..(12): 5-methyl modified nucleotide
  modified_base (16)..(16): 5-methyl modified nucleotide
  modified_base (17)..(17): 5-methyl modified nucleotide
  modified_base (18)..(18): 5-methyl bicyclic nucleic acid
  modified_base (19)..(19): bicyclic nucleic acid (BNA)
taaguucuguccaagcccg

SEQ ID NO: 20684 - DNA, 18 bp, Artificial Sequence
  source: /note="Description of Artificial Sequence: Synthetic oligonucleotide"
  source: /note="Description of Combined DNA/RNA Molecule: Synthetic oligonucleotide"
  source: /note="DNA/RNA"
  modified_base (1)..(1): bicyclic nucleic acid (BNA)
  modified_base (2)..(2): bicyclic nucleic acid (BNA)
  modified_base (7)..(7): 5-methyl modified nucleotide
  modified_base (11)..(11): 5-methyl modified nucleotide
  modified_base (12)..(12): 5-methyl modified nucleotide
  modified_base (16)..(16): 5-methyl modified nucleotide
  modified_base (17)..(17): 5-methyl bicyclic nucleic acid
  modified_base (18)..(18): 5-methyl bicyclic nucleic acid
taaguucuguccaagccc

SEQ ID NO: 20685 - DNA, 17 bp, Artificial Sequence
  source: /note="Description of Artificial Sequence: Synthetic oligonucleotide"
  source: /note="Description of Combined DNA/RNA Molecule: Synthetic oligonucleotide"
  source: /note="DNA/RNA"
  modified_base (1)..(1): bicyclic nucleic acid (BNA)
  modified_base (2)..(2): bicyclic nucleic acid (BNA)
  modified_base (7)..(7): 5-methyl modified nucleotide
  modified_base (11)..(11): 5-methyl modified nucleotide
  modified_base (12)..(12): 5-methyl modified nucleotide
  modified_base (16)..(16): 5-methyl bicyclic nucleic acid
  modified_base (17)..(17): 5-methyl bicyclic nucleic acid
taaguucuguccaagcc

SEQ ID NO: 20686 - DNA, 16 bp, Artificial Sequence
  source: /note="Description of Artificial Sequence: Synthetic oligonucleotide"
  source: /note="Description of Combined DNA/RNA Molecule: Synthetic oligonucleotide"
  source: /note="DNA/RNA"
  modified_base (1)..(1): bicyclic nucleic acid (BNA)
  modified_base (2)..(2): bicyclic nucleic acid (BNA)
  modified_base (7)..(7): 5-methyl modified nucleotide
  modified_base (11)..(11): 5-methyl modified nucleotide
  modified_base (12)..(12): 5-methyl modified nucleotide
  modified_base (15)..(15): bicyclic nucleic acid (BNA)
  modified_base (16)..(16): 5-methyl bicyclic nucleic acid
taaguucuguccaagc

SEQ ID NO: 20687 - DNA, 14 bp, Artificial Sequence
  source: /note="Description of Artificial Sequence: Synthetic oligonucleotide"
  source: /note="Description of Combined DNA/RNA Molecule: Synthetic oligonucleotide"
  source: /note="DNA/RNA"
  modified_base (1)..(1): bicyclic nucleic acid (BNA)
  modified_base (2)..(2): bicyclic nucleic acid (BNA)
  modified_base (7)..(7): 5-methyl modified nucleotide
  modified_base (11)..(11): 5-methyl modified nucleotide
  modified_base (12)..(12): 5-methyl modified nucleotide
  modified_base (13)..(13): bicyclic nucleic acid (BNA)
  modified_base (14)..(14): bicyclic nucleic acid (BNA)
taaguucuguccaa

SEQ ID NO: 20688 - DNA, 13 bp, Artificial Sequence
  source: /note="Description of Artificial Sequence: Synthetic oligonucleotide"
  source: /note="Description of Combined DNA/RNA Molecule: Synthetic oligonucleotide"
  source: /note="DNA/RNA"
  modified_base (1)..(1): bicyclic nucleic acid (BNA)
  modified_base (2)..(2): bicyclic nucleic acid (BNA)
  modified_base (7)..(7): 5-methyl modified nucleotide
  modified_base (11)..(11): 5-methyl modified nucleotide
  modified_base (12)..(12): 5-methyl bicyclic nucleic acid
  modified_base (13)..(13): bicyclic nucleic acid (BNA)
taaguucugucca

SEQ ID NO: 20689 - DNA, 12 bp, Artificial Sequence
  source: /note="Description of Artificial Sequence: Synthetic oligonucleotide"
  source: /note="Description of Combined DNA/RNA Molecule: Synthetic oligonucleotide"
  source: /note="DNA/RNA"
  modified_base (1)..(1): bicyclic nucleic acid (BNA)
  modified_base (2)..(2): bicyclic nucleic acid (BNA)
  modified_base (7)..(7): 5-methyl modified nucleotide
  modified_base (11)..(11): 5-methyl bicyclic nucleic acid
  modified_base (12)..(12): 5-methyl bicyclic nucleic acid
taaguucugucc

SEQ ID NO: 20690 - DNA, 11 bp, Artificial Sequence
  source: /note="Description of Artificial Sequence: Synthetic oligonucleotide"
  source: /note="Description of Combined DNA/RNA Molecule: Synthetic oligonucleotide"
  source: /note="DNA/RNA"
  modified_base (1)..(1): bicyclic nucleic acid (BNA)
  modified_base (2)..(2): bicyclic nucleic acid (BNA)
  modified_base (7)..(7): 5-methyl modified nucleotide
  modified_base (10)..(10): bicyclic nucleic acid (BNA)
  modified_base (11)..(11): 5-methyl bicyclic nucleic acid
taaguucugtc

SEQ ID NO: 20691 - DNA, 10 bp, Artificial Sequence
  source: /note="Description of Artificial Sequence: Synthetic oligonucleotide"
  source: /note="Description of Combined DNA/RNA Molecule: Synthetic oligonucleotide"
  source: /note="DNA/RNA"
  modified_base (1)..(1): bicyclic nucleic acid (BNA)
  modified_base (2)..(2): bicyclic nucleic acid (BNA)
  modified_base (7)..(7): 5-methyl modified nucleotide
  modified_base (9)..(9): bicyclic nucleic acid (BNA)
  modified_base (10)..(10): bicyclic nucleic acid (BNA)
taaguucugt

SEQ ID NO: 20692 - DNA, 9 bp, Artificial Sequence
  source: /note="Description of Artificial Sequence: Synthetic oligonucleotide"
  source: /note="Description of Combined DNA/RNA Molecule: Synthetic oligonucleotide"
  source: /note="DNA/RNA"
  modified_base (1)..(1): bicyclic nucleic acid (BNA)
  modified_base (2)..(2): bicyclic nucleic acid (BNA)
  modified_base (7)..(7): 5-methyl modified nucleotide
  modified_base (8)..(8): bicyclic nucleic acid (BNA)
  modified_base (9)..(9): bicyclic nucleic acid (BNA)
taaguuctg

SEQ ID NO: 20693 - DNA, 8 bp, Artificial Sequence
  source: /note="Description of Artificial Sequence: Synthetic oligonucleotide"
  source: /note="Description of Combined DNA/RNA Molecule: Synthetic oligonucleotide"
  source: /note="DNA/RNA"
  modified_base (1)..(1): bicyclic nucleic acid (BNA)
  modified_base (2)..(2): bicyclic nucleic acid (BNA)
  modified_base (7)..(7): 5-methyl bicyclic nucleic acid
  modified_base (8)..(8): bicyclic nucleic acid (BNA)
taaguuct

SEQ ID NO: 20694 - DNA, 20 bp, Artificial Sequence
  source: /note="Description of Artificial Sequence: Synthetic oligonucleotide"
  source: /note="Description of Combined DNA/RNA Molecule: Synthetic oligonucleotide"
  source: /note="DNA/RNA"
  modified_base (1)..(1): bicyclic nucleic acid (BNA)
  modified_base (2)..(2): bicyclic nucleic acid (BNA)
  modified_base (8)..(8): 5-methyl modified nucleotide
  modified_base (12)..(12): 5-methyl modified nucleotide
  modified_base (13)..(13): 5-methyl modified nucleotide
  modified_base (17)..(17): 5-methyl modified nucleotide
  modified_base (18)..(18): 5-methyl modified nucleotide
  modified_base (19)..(19): 5-methyl bicyclic nucleic acid
  modified_base (20)..(20): bicyclic nucleic acid (BNA)
gtaaguucuguccaagcccg

SEQ ID NO: 20695 - DNA, 19 bp, Artificial Sequence
  source: /note="Description of Artificial Sequence: Synthetic oligonucleotide"
  source: /note="Description of Combined DNA/RNA Molecule: Synthetic oligonucleotide"
  source: /note="DNA/RNA"
  modified_base (1)..(1): bicyclic nucleic acid (BNA)
  modified_base (2)..(2): bicyclic nucleic acid (BNA)
  modified_base (8)..(8): 5-methyl modified nucleotide
  modified_base (12)..(12): 5-methyl modified nucleotide
  modified_base (13)..(13): 5-methyl modified nucleotide
  modified_base (17)..(17): 5-methyl modified nucleotide
  modified_base (18)..(18): 5-methyl bicyclic nucleic acid
  modified_base (19)..(19): 5-methyl bicyclic nucleic acid
gtaaguucuguccaagccc

SEQ ID NO: 20696 - DNA, 17 bp, Artificial Sequence
  source: /note="Description of Artificial Sequence: Synthetic oligonucleotide"
  source: /note="Description of Combined DNA/RNA Molecule: Synthetic oligonucleotide"
  source: /note="DNA/RNA"
  modified_base (1)..(1): bicyclic nucleic acid (BNA)
  modified_base (2)..(2): bicyclic nucleic acid (BNA)
  modified_base (8)..(8): 5-methyl modified nucleotide
  modified_base (12)..(12): 5-methyl modified nucleotide
  modified_base (13)..(13): 5-methyl modified nucleotide
  modified_base (16)..(16): bicyclic nucleic acid (BNA)
  modified_base (17)..(17): 5-methyl bicyclic nucleic acid
gtaaguucuguccaagc

SEQ ID NO: 20697 - DNA, 16 bp, Artificial Sequence
  source: /note="Description of Artificial Sequence: Synthetic oligonucleotide"
  source: /note="Description of Combined DNA/RNA Molecule: Synthetic oligonucleotide"
  source: /note="DNA/RNA"
  modified_base (1)..(1): bicyclic nucleic acid (BNA)
  modified_base (2)..(2): bicyclic nucleic acid (BNA)
  modified_base (8)..(8): 5-methyl modified nucleotide
  modified_base (12)..(12): 5-methyl modified nucleotide
  modified_base (13)..(13): 5-methyl modified nucleotide
  modified_base (15)..(15): bicyclic nucleic acid (BNA)
  modified_base (16)..(16): bicyclic nucleic acid (BNA)
gtaaguucuguccaag

SEQ ID NO: 20698 - DNA, 15 bp, Artificial Sequence
  source: /note="Description of Artificial Sequence: Synthetic oligonucleotide"
  source: /note="Description of Combined DNA/RNA Molecule: Synthetic oligonucleotide"
  source: /note="DNA/RNA"
  modified_base (1)..(1): bicyclic nucleic acid (BNA)
  modified_base (2)..(2): bicyclic nucleic acid (BNA)
  modified_base (8)..(8): 5-methyl modified nucleotide
  modified_base (12)..(12): 5-methyl modified nucleotide
  modified_base (13)..(13): 5-methyl modified nucleotide
  modified_base (14)..(14): bicyclic nucleic acid (BNA)
  modified_base (15)..(15): bicyclic nucleic acid (BNA)
gtaaguucuguccaa

SEQ ID NO: 20699 - DNA, 14 bp, Artificial Sequence
  source: /note="Description of Artificial Sequence: Synthetic oligonucleotide"
  source: /note="Description of Combined DNA/RNA Molecule: Synthetic oligonucleotide"
  source: /note="DNA/RNA"
  modified_base (1)..(1): bicyclic nucleic acid (BNA)
  modified_base (2)..(2): bicyclic nucleic acid (BNA)
  modified_base (8)..(8): 5-methyl modified nucleotide
  modified_base (12)..(12): 5-methyl modified nucleotide
  modified_base (13)..(13): 5-methyl bicyclic nucleic acid
  modified_base (14)..(14): bicyclic nucleic acid (BNA)
gtaaguucugucca

SEQ ID NO: 20700 - DNA, 13 bp, Artificial Sequence
  source: /note="Description of Artificial Sequence: Synthetic oligonucleotide"
  source: /note="Description of Combined DNA/RNA Molecule: Synthetic oligonucleotide"
  source: /note="DNA/RNA"
  modified_base (1)..(1): bicyclic nucleic acid (BNA)
  modified_base (2)..(2): bicyclic nucleic acid (BNA)
  modified_base (8)..(8): 5-methyl modified nucleotide
  modified_base (12)..(12): 5-methyl bicyclic nucleic acid
  modified_base (13)..(13): 5-methyl bicyclic nucleic acid
gtaaguucugucc

SEQ ID NO: 20701 - DNA, 12 bp, Artificial Sequence
  source: /note="Description of Artificial Sequence: Synthetic oligonucleotide"
  source: /note="Description of Combined DNA/RNA Molecule: Synthetic oligonucleotide"
  source: /note="DNA/RNA"
  modified_base (1)..(1): bicyclic nucleic acid (BNA)
  modified_base (2)..(2): bicyclic nucleic acid (BNA)
  modified_base (8)..(8): 5-methyl modified nucleotide
  modified_base (11)..(11): bicyclic nucleic acid (BNA)
  modified_base (12)..(12): 5-methyl bicyclic nucleic acid
gtaaguucugtc

SEQ ID NO: 20702 - DNA, 11 bp, Artificial Sequence
  source: /note="Description of Artificial Sequence: Synthetic oligonucleotide"
  source: /note="Description of Combined DNA/RNA Molecule: Synthetic oligonucleotide"
  source: /note="DNA/RNA"
  modified_base (1)..(1): bicyclic nucleic acid (BNA)
  modified_base (2)..(2): bicyclic nucleic acid (BNA)
  modified_base (8)..(8): 5-methyl modified nucleotide
  modified_base (10)..(10): bicyclic nucleic acid (BNA)
  modified_base (11)..(11): bicyclic nucleic acid (BNA)
gtaaguucugt

SEQ ID NO: 20703 - DNA, 10 bp, Artificial Sequence
  source: /note="Description of Artificial Sequence: Synthetic oligonucleotide"
  source: /note="Description of Combined DNA/RNA Molecule: Synthetic oligonucleotide"
  source: /note="DNA/RNA"
  modified_base (1)..(1): bicyclic nucleic acid (BNA)
  modified_base (2)..(2): bicyclic nucleic acid (BNA)
  modified_base (8)..(8): 5-methyl modified nucleotide
  modified_base (9)..(9): bicyclic nucleic acid (BNA)
  modified_base (10)..(10): bicyclic nucleic acid (BNA)
gtaaguuctg

SEQ ID NO: 20704 - DNA, 9 bp, Artificial Sequence
  source: /note="Description of Artificial Sequence: Synthetic oligonucleotide"
  source: /note="Description of Combined DNA/RNA Molecule: Synthetic oligonucleotide"
  source: /note="DNA/RNA"
  modified_base (1)..(1): bicyclic nucleic acid (BNA)
  modified_base (2)..(2): bicyclic nucleic acid (BNA)
  modified_base (8)..(8): 5-methyl bicyclic nucleic acid
  modified_base (9)..(9): bicyclic nucleic acid (BNA)
gtaaguuct

SEQ ID NO: 20705 - DNA, 8 bp, Artificial Sequence
  source: /note="Description of Artificial Sequence: Synthetic oligonucleotide"
  source: /note="Description of Combined DNA/RNA Molecule: Synthetic oligonucleotide"
  source: /note="DNA/RNA"
  modified_base (1)..(1): bicyclic nucleic acid (BNA)
  modified_base (2)..(2): bicyclic nucleic acid (BNA)
  modified_base (7)..(7): bicyclic nucleic acid (BNA)
  modified_base (8)..(8): 5-methyl bicyclic nucleic acid
gtaagutc

SEQ ID NO: 20706 - RNA, 20 nt, Artificial Sequence
  source: /note="Description of Artificial Sequence: Synthetic oligonucleotide"
  source: /note="RNA"
  modified_base (1)..(1): bicyclic nucleic acid (BNA)
  modified_base (2)..(2): bicyclic nucleic acid (BNA)
  modified_base (9)..(9): 5-methyl modified nucleotide
  modified_base (13)..(13): 5-methyl modified nucleotide
  modified_base (14)..(14): 5-methyl modified nucleotide
  modified_base (18)..(18): 5-methyl modified nucleotide
  modified_base (19)..(19): 5-methyl bicyclic nucleic acid
  modified_base (20)..(20): 5-methyl bicyclic nucleic acid
gguaaguucuguccaagccc

SEQ ID NO: 20707 - RNA, 19 nt, Artificial Sequence
  source: /note="Description of Artificial Sequence: Synthetic oligonucleotide"
  source: /note="RNA"
  modified_base (1)..(1): bicyclic nucleic acid (BNA)
  modified_base (2)..(2): bicyclic nucleic acid (BNA)
  modified_base (9)..(9): 5-methyl modified nucleotide
  modified_base (13)..(13): 5-methyl modified nucleotide
  modified_base (14)..(14): 5-methyl modified nucleotide
  modified_base (18)..(18): 5-methyl bicyclic nucleic acid
  modified_base (19)..(19): 5-methyl bicyclic nucleic acid
gguaaguucuguccaagcc

SEQ ID NO: 20708 - RNA, 17 nt, Artificial Sequence
  source: /note="Description of Artificial Sequence: Synthetic oligonucleotide"
  source: /note="RNA"
  modified_base (1)..(1): bicyclic nucleic acid (BNA)
  modified_base (2)..(2): bicyclic nucleic acid (BNA)
  modified_base (9)..(9): 5-methyl modified nucleotide
  modified_base (13)..(13): 5-methyl modified nucleotide
  modified_base (14)..(14): 5-methyl modified nucleotide
  modified_base (16)..(16): bicyclic nucleic acid (BNA)
  modified_base (17)..(17): bicyclic nucleic acid (BNA)
gguaaguucuguccaag

SEQ ID NO: 20709 - RNA, 16 nt, Artificial Sequence
  source: /note="Description of Artificial Sequence: Synthetic oligonucleotide"
  source: /note="RNA"
  modified_base (1)..(1): bicyclic nucleic acid (BNA)
  modified_base (2)..(2): bicyclic nucleic acid (BNA)
  modified_base (9)..(9): 5-methyl modified nucleotide
  modified_base (13)..(13): 5-methyl modified nucleotide
  modified_base (14)..(14): 5-methyl modified nucleotide
  modified_base (15)..(15): bicyclic nucleic acid (BNA)
  modified_base (16)..(16): bicyclic nucleic acid (BNA)
gguaaguucuguccaa

SEQ ID NO: 20710 - RNA, 15 nt, Artificial Sequence
  source: /note="Description of Artificial Sequence: Synthetic oligonucleotide"
  source: /note="RNA"
  modified_base (1)..(1): bicyclic nucleic acid (BNA)
  modified_base (2)..(2): bicyclic nucleic acid (BNA)
  modified_base (9)..(9): 5-methyl modified nucleotide
  modified_base (13)..(13): 5-methyl modified nucleotide
  modified_base (14)..(14): 5-methyl bicyclic nucleic acid
  modified_base (15)..(15): bicyclic nucleic acid (BNA)
gguaaguucugucca

SEQ ID NO: 20711 - RNA, 14 nt, Artificial Sequence
  source: /note="Description of Artificial Sequence: Synthetic oligonucleotide"
  source: /note="RNA"
  modified_base (1)..(1): bicyclic nucleic acid (BNA)
  modified_base (2)..(2): bicyclic nucleic acid (BNA)
  modified_base (9)..(9): 5-methyl modified nucleotide
  modified_base (13)..(13): 5-methyl bicyclic nucleic acid
  modified_base (14)..(14): 5-methyl bicyclic nucleic acid
gguaaguucugucc

SEQ ID NO: 20712 - DNA, 13 bp, Artificial Sequence
  source: /note="Description of Artificial Sequence: Synthetic oligonucleotide"
  source: /note="Description of Combined DNA/RNA Molecule: Synthetic oligonucleotide"
  source: /note="DNA/RNA"
  modified_base (1)..(1): bicyclic nucleic acid (BNA)
  modified_base (2)..(2): bicyclic nucleic acid (BNA)
  modified_base (9)..(9): 5-methyl modified nucleotide
  modified_base (12)..(12): bicyclic nucleic acid (BNA)
  modified_base (13)..(13): 5-methyl bicyclic nucleic acid
gguaaguucugtc

SEQ ID NO: 20713 - DNA, 12 bp, Artificial Sequence
  source: /note="Description of Artificial Sequence: Synthetic oligonucleotide"
  source: /note="Description of Combined DNA/RNA Molecule: Synthetic oligonucleotide"
  source: /note="DNA/RNA"
  modified_base (1)..(1): bicyclic nucleic acid (BNA)
  modified_base (2)..(2): bicyclic nucleic acid (BNA)
  modified_base (9)..(9): 5-methyl modified nucleotide
  modified_base (11)..(11): bicyclic nucleic acid (BNA)
  modified_base (12)..(12): bicyclic nucleic acid (BNA)
gguaaguucugt

SEQ ID NO: 20714 - DNA, 11 bp, Artificial Sequence
  source: /note="Description of Artificial Sequence: Synthetic oligonucleotide"
  source: /note="Description of Combined DNA/RNA Molecule: Synthetic oligonucleotide"
  source: /note="DNA/RNA"
  modified_base (1)..(1): bicyclic nucleic acid (BNA)
  modified_base (2)..(2): bicyclic nucleic acid (BNA)
  modified_base (9)..(9): 5-methyl modified nucleotide
  modified_base (10)..(10): bicyclic nucleic acid (BNA)
  modified_base (11)..(11): bicyclic nucleic acid (BNA)
gguaaguuctg

SEQ ID NO: 20715 - DNA, 10 bp, Artificial Sequence
  source: /note="Description of Artificial Sequence: Synthetic oligonucleotide"
  source: /note="Description of Combined DNA/RNA Molecule: Synthetic oligonucleotide"
  source: /note="DNA/RNA"
  modified_base (1)..(1): bicyclic nucleic acid (BNA)
  modified_base (2)..(2): bicyclic nucleic acid (BNA)
  modified_base (9)..(9): 5-methyl bicyclic nucleic acid
  modified_base (10)..(10): bicyclic nucleic acid (BNA)
gguaaguuct

SEQ ID NO: 20716 - DNA, 9 bp, Artificial Sequence
  source: /note="Description of Artificial Sequence: Synthetic oligonucleotide"
  source: /note="Description of Combined DNA/RNA Molecule: Synthetic oligonucleotide"
  source: /note="DNA/RNA"
  modified_base (1)..(1): bicyclic nucleic acid (BNA)
  modified_base (2)..(2): bicyclic nucleic acid (BNA)
  modified_base (8)..(8): bicyclic nucleic acid (BNA)
  modified_base (9)..(9): 5-methyl bicyclic nucleic acid
gguaagutc

SEQ ID NO: 20717 - DNA, 8 bp, Artificial Sequence
  source: /note="Description of Artificial Sequence: Synthetic oligonucleotide"
  source: /note="Description of Combined DNA/RNA Molecule: Synthetic oligonucleotide"
  source: /note="DNA/RNA"
  modified_base (1)..(1): bicyclic nucleic acid (BNA)
  modified_base (2)..(2): bicyclic nucleic acid (BNA)
  modified_base (7)..(7): bicyclic nucleic acid (BNA)
  modified_base (8)..(8): bicyclic nucleic acid (BNA)
gguaagtt

SEQ ID NO: 20718 - RNA, 20 nt, Artificial Sequence
  source: /note="Description of Artificial Sequence: Synthetic oligonucleotide"
  source: /note="RNA"
  modified_base (1)..(1): 5-methyl bicyclic nucleic acid
  modified_base (2)..(2): bicyclic nucleic acid (BNA)
  modified_base (10)..(10): 5-methyl modified nucleotide
  modified_base (14)..(14): 5-methyl modified nucleotide
  modified_base (15)..(15): 5-methyl modified nucleotide
  modified_base (19)..(19): 5-methyl bicyclic nucleic acid
  modified_base (20)..(20): 5-methyl bicyclic nucleic acid
cgguaaguucuguccaagcc

SEQ ID NO: 20719 - RNA, 19 nt, Artificial Sequence
  source: /note="Description of Artificial Sequence: Synthetic oligonucleotide"
  source: /note="RNA"
  modified_base (1)..(1): 5-methyl bicyclic nucleic acid
  modified_base (2)..(2): bicyclic nucleic acid (BNA)
  modified_base (10)..(10): 5-methyl modified nucleotide
  modified_base (14)..(14): 5-methyl modified nucleotide
  modified_base (15)..(15): 5-methyl modified nucleotide
  modified_base (18)..(18): bicyclic nucleic acid (BNA)
  modified_base (19)..(19): 5-methyl bicyclic nucleic acid
cgguaaguucuguccaagc

SEQ ID NO: 20720 - RNA, 18 nt, Artificial Sequence
  source: /note="Description of Artificial Sequence: Synthetic oligonucleotide"
  source: /note="RNA"
  modified_base (1)..(1): 5-methyl bicyclic nucleic acid
  modified_base (2)..(2): bicyclic nucleic acid (BNA)
  modified_base (10)..(10): 5-methyl modified nucleotide
  modified_base (14)..(14): 5-methyl modified nucleotide
  modified_base (15)..(15): 5-methyl modified nucleotide
  modified_base (17)..(17): bicyclic nucleic acid (BNA)
  modified_base (18)..(18): bicyclic nucleic acid (BNA)
cgguaaguucuguccaag

SEQ ID NO: 20721 - RNA, 17 nt, Artificial Sequence
  source: /note="Description of Artificial Sequence: Synthetic oligonucleotide"
  source: /note="RNA"
  modified_base (1)..(1): 5-methyl bicyclic nucleic acid
  modified_base (2)..(2): bicyclic nucleic acid (BNA)
  modified_base (10)..(10): 5-methyl modified nucleotide
  modified_base (14)..(14): 5-methyl modified nucleotide
  modified_base (15)..(15): 5-methyl modified nucleotide
  modified_base (16)..(16): bicyclic nucleic acid (BNA)
  modified_base (17)..(17): bicyclic nucleic acid (BNA)
cgguaaguucuguccaa

SEQ ID NO: 20722 - RNA, 16 nt, Artificial Sequence
  source: /note="Description of Artificial Sequence: Synthetic oligonucleotide"
  source: /note="RNA"
  modified_base (1)..(1): 5-methyl bicyclic nucleic acid
  modified_base (2)..(2): bicyclic nucleic acid (BNA)
  modified_base (10)..(10): 5-methyl modified nucleotide
  modified_base (14)..(14): 5-methyl modified nucleotide
  modified_base (15)..(15): 5-methyl bicyclic nucleic acid
  modified_base (16)..(16): bicyclic nucleic acid (BNA)
cgguaaguucugucca

SEQ ID NO: 20723 - RNA, 15 nt, Artificial Sequence
  source: /note="Description of Artificial Sequence: Synthetic oligonucleotide"
  source: /note="RNA"
  modified_base (1)..(1): 5-methyl bicyclic nucleic acid
  modified_base (2)..(2): bicyclic nucleic acid (BNA)
  modified_base (10)..(10): 5-methyl modified nucleotide
  modified_base (14)..(14): 5-methyl bicyclic nucleic acid
  modified_base (15)..(15): 5-methyl bicyclic nucleic acid
cgguaaguucugucc

SEQ ID NO: 20724 - DNA, 14 bp, Artificial Sequence
  source: /note="Description of Artificial Sequence: Synthetic oligonucleotide"
  source: /note="Description of Combined DNA/RNA Molecule: Synthetic oligonucleotide"
  source: /note="DNA/RNA"
  modified_base (1)..(1): 5-methyl bicyclic nucleic acid
  modified_base (2)..(2): bicyclic nucleic acid (BNA)
  modified_base (10)..(10): 5-methyl modified nucleotide
  modified_base (13)..(13): bicyclic nucleic acid (BNA)
  modified_base (14)..(14): 5-methyl bicyclic nucleic acid
cgguaaguucugtc

SEQ ID NO: 20725 - DNA, 13 bp, Artificial Sequence
  source: /note="Description of Artificial Sequence: Synthetic oligonucleotide"
  source: /note="Description of Combined DNA/RNA Molecule: Synthetic oligonucleotide"
  source: /note="DNA/RNA"
  modified_base (1)..(1): 5-methyl bicyclic nucleic acid
  modified_base (2)..(2): bicyclic nucleic acid (BNA)
  modified_base (10)..(10): 5-methyl modified nucleotide
  modified_base (12)..(12): bicyclic nucleic acid (BNA)
  modified_base (13)..(13): bicyclic nucleic acid (BNA)
cgguaaguucugt

SEQ ID NO: 20726 - DNA, 12 bp, Artificial Sequence
  source: /note="Description of Artificial Sequence: Synthetic oligonucleotide"
  source: /note="Description of Combined DNA/RNA Molecule: Synthetic oligonucleotide"
  source: /note="DNA/RNA"
  modified_base (1)..(1): 5-methyl bicyclic nucleic acid
  modified_base (2)..(2): bicyclic nucleic acid (BNA)
  modified_base (10)..(10): 5-methyl modified nucleotide
  modified_base (11)..(11): bicyclic nucleic acid (BNA)
  modified_base (12)..(12): bicyclic nucleic acid (BNA)
cgguaaguuctg

SEQ ID NO: 20727 - DNA, 11 bp, Artificial Sequence
  source: /note="Description of Artificial Sequence: Synthetic oligonucleotide"
  source: /note="Description of Combined DNA/RNA Molecule: Synthetic oligonucleotide"
  source: /note="DNA/RNA"
  modified_base (1)..(1): 5-methyl bicyclic nucleic acid
  modified_base (2)..(2): bicyclic nucleic acid (BNA)
  modified_base (10)..(10): 5-methyl bicyclic nucleic acid
  modified_base (11)..(11): bicyclic nucleic acid (BNA)
cgguaaguuct

SEQ ID NO: 20728 - DNA, 10 bp, Artificial Sequence
  source: /note="Description of Artificial Sequence: Synthetic oligonucleotide"
  source: /note="Description of Combined DNA/RNA Molecule: Synthetic oligonucleotide"
  source: /note="DNA/RNA"
  modified_base (1)..(1): 5-methyl bicyclic nucleic acid
  modified_base (2)..(2): bicyclic nucleic acid (BNA)
  modified_base (9)..(9): bicyclic nucleic acid (BNA)
  modified_base (10)..(10): 5-methyl bicyclic nucleic acid
cgguaagutc

SEQ ID NO: 20729 - DNA, 9 bp, Artificial Sequence
  source: /note="Description of Artificial Sequence: Synthetic oligonucleotide"
  source: /note="Description of Combined DNA/RNA Molecule: Synthetic oligonucleotide"
  source: /note="DNA/RNA"
  modified_base (1)..(1): 5-methyl bicyclic nucleic acid
  modified_base (2)..(2): bicyclic nucleic acid (BNA)
  modified_base (8)..(8): bicyclic nucleic acid (BNA)
  modified_base (9)..(9): bicyclic nucleic acid (BNA)
cgguaagtt

SEQ ID NO: 20730 - DNA, 8 bp, Artificial Sequence
  source: /note="Description of Artificial Sequence: Synthetic oligonucleotide"
  source: /note="Description of Combined DNA/RNA Molecule: Synthetic oligonucleotide"
  source: /note="DNA/RNA"
  modified_base (1)..(1): 5-methyl bicyclic nucleic acid
  modified_base (2)..(2): bicyclic nucleic acid (BNA)
  modified_base (7)..(7): bicyclic nucleic acid (BNA)
  modified_base (8)..(8): bicyclic nucleic acid (BNA)
cgguaagt

SEQ ID NO: 20731 - DNA, 20 bp, Artificial Sequence
  source: /note="Description of Artificial Sequence: Synthetic oligonucleotide"
  source: /note="Description of Combined DNA/RNA Molecule: Synthetic oligonucleotide"
  source: /note="DNA/RNA"
  modified_base (1)..(1): bicyclic nucleic acid (BNA)
  modified_base (2)..(2): 5-methyl bicyclic nucleic acid
  modified_base (11)..(11): 5-methyl modified nucleotide
  modified_base (15)..(15): 5-methyl modified nucleotide
  modified_base (16)..(16): 5-methyl modified nucleotide
  modified_base (19)..(19): bicyclic nucleic acid (BNA)
  modified_base (20)..(20): 5-methyl bicyclic nucleic acid
tcgguaaguucuguccaagc

SEQ ID NO: 20732 - DNA, 19 bp, Artificial Sequence
  source: /note="Description of Artificial Sequence: Synthetic oligonucleotide"
  source: /note="Description of Combined DNA/RNA Molecule: Synthetic oligonucleotide"
  source: /note="DNA/RNA"
  modified_base (1)..(1): bicyclic nucleic acid (BNA)
  modified_base (2)..(2): 5-methyl bicyclic nucleic acid
  modified_base (11)..(11): 5-methyl modified nucleotide
  modified_base (15)..(15): 5-methyl modified nucleotide
  modified_base (16)..(16): 5-methyl modified nucleotide
  modified_base (18)..(18): bicyclic nucleic acid (BNA)
  modified_base (19)..(19): bicyclic nucleic acid (BNA)
tcgguaaguucuguccaag

SEQ ID NO: 20733 - DNA, 18 bp, Artificial Sequence
  source: /note="Description of Artificial Sequence: Synthetic oligonucleotide"
  source: /note="Description of Combined DNA/RNA Molecule: Synthetic oligonucleotide"
  source: /note="DNA/RNA"
  modified_base (1)..(1): bicyclic nucleic acid (BNA)
  modified_base (2)..(2): 5-methyl bicyclic nucleic acid
  modified_base (11)..(11): 5-methyl modified nucleotide
  modified_base (15)..(15): 5-methyl modified nucleotide
  modified_base (16)..(16): 5-methyl modified nucleotide
  modified_base (17)..(17): bicyclic nucleic acid (BNA)
  modified_base (18)..(18): bicyclic nucleic acid (BNA)
tcgguaaguucuguccaa

SEQ ID NO: 20734 - DNA, 17 bp, Artificial Sequence
  source: /note="Description of Artificial Sequence: Synthetic oligonucleotide"
  source: /note="Description of Combined DNA/RNA Molecule: Synthetic oligonucleotide"
  source: /note="DNA/RNA"
  modified_base (1)..(1): bicyclic nucleic acid (BNA)
  modified_base (2)..(2): 5-methyl bicyclic nucleic acid
  modified_base (11)..(11): 5-methyl modified nucleotide
  modified_base (15)..(15): 5-methyl modified nucleotide
  modified_base (16)..(16): 5-methyl bicyclic nucleic acid
  modified_base (17)..(17): bicyclic nucleic acid (BNA)
tcgguaaguucugucca

SEQ ID NO: 20735 - DNA, 16 bp, Artificial Sequence
  source: /note="Description of Artificial Sequence: Synthetic oligonucleotide"
  source: /note="Description of Combined DNA/RNA Molecule: Synthetic oligonucleotide"
  source: /note="DNA/RNA"
  modified_base (1)..(1): bicyclic nucleic acid (BNA)
  modified_base (2)..(2): 5-methyl bicyclic nucleic acid
  modified_base (11)..(11): 5-methyl modified nucleotide
  modified_base (15)..(15): 5-methyl bicyclic nucleic acid
  modified_base (16)..(16): 5-methyl bicyclic nucleic acid
tcgguaaguucugucc

SEQ ID NO: 20736 - DNA, 15 bp, Artificial Sequence
  source: /note="Description of Artificial Sequence: Synthetic oligonucleotide"
  source: /note="Description of Combined DNA/RNA Molecule: Synthetic oligonucleotide"
  source: /note="DNA/RNA"
  modified_base (1)..(1): bicyclic nucleic acid (BNA)
  modified_base (2)..(2): 5-methyl bicyclic nucleic acid
  modified_base (11)..(11): 5-methyl modified nucleotide
  modified_base (14)..(14): bicyclic nucleic acid (BNA)
  modified_base (15)..(15): 5-methyl bicyclic nucleic acid
tcgguaaguucugtc

SEQ ID NO: 20737 - DNA, 14 bp, Artificial Sequence
  source: /note="Description of Artificial Sequence: Synthetic oligonucleotide"
  source: /note="Description of Combined DNA/RNA Molecule: Synthetic oligonucleotide"
  source: /note="DNA/RNA"
  modified_base (1)..(1): bicyclic nucleic acid (BNA)
  modified_base (2)..(2): 5-methyl bicyclic nucleic acid
  modified_base (11)..(11): 5-methyl modified nucleotide
  modified_base (13)..(13): bicyclic nucleic acid (BNA)
  modified_base (14)..(14): bicyclic nucleic acid (BNA)
tcgguaaguucugt

SEQ ID NO: 20738 - DNA, 13 bp, Artificial Sequence
  source: /note="Description of Artificial Sequence: Synthetic oligonucleotide"
  source: /note="Description of Combined DNA/RNA Molecule: Synthetic oligonucleotide"
  source: /note="DNA/RNA"
  modified_base (1)..(1): bicyclic nucleic acid (BNA)
  modified_base (2)..(2): 5-methyl bicyclic nucleic acid
  modified_base (11)..(11): 5-methyl modified nucleotide
  modified_base (12)..(12): bicyclic nucleic acid (BNA)
  modified_base (13)..(13): bicyclic nucleic acid (BNA)
tcgguaaguuctg

SEQ ID NO: 20739 - DNA, 12 bp, Artificial Sequence
  source: /note="Description of Artificial Sequence: Synthetic oligonucleotide"
  source: /note="Description of Combined DNA/RNA Molecule: Synthetic oligonucleotide"
  source: /note="DNA/RNA"
  modified_base (1)..(1): bicyclic nucleic acid (BNA)
  modified_base (2)..(2): 5-methyl bicyclic nucleic acid
  modified_base (11)..(11): 5-methyl bicyclic nucleic acid
  modified_base (12)..(12): bicyclic nucleic acid (BNA)
tcgguaaguuct

SEQ ID NO: 20740 - DNA, 11 bp, Artificial Sequence
  source: /note="Description of Artificial Sequence: Synthetic oligonucleotide"
  source: /note="Description of Combined DNA/RNA Molecule: Synthetic oligonucleotide"
  source: /note="DNA/RNA"
  modified_base (1)..(1): bicyclic nucleic acid (BNA)
  modified_base (2)..(2): 5-methyl bicyclic nucleic acid
  modified_base (10)..(10): bicyclic nucleic acid (BNA)
  modified_base (11)..(11): 5-methyl bicyclic nucleic acid
tcgguaagutc

SEQ ID NO: 20741 - DNA, 10 bp, Artificial Sequence
  source: /note="Description of Artificial Sequence: Synthetic oligonucleotide"
  source: /note="Description of Combined DNA/RNA Molecule: Synthetic oligonucleotide"
  source: /note="DNA/RNA"
  modified_base (1)..(1): bicyclic nucleic acid (BNA)
  modified_base (2)..(2): 5-methyl bicyclic nucleic acid
  modified_base (9)..(9): bicyclic nucleic acid (BNA)
  modified_base (10)..(10): bicyclic nucleic acid (BNA)
tcgguaagtt

SEQ ID NO: 20742 - DNA, 9 bp, Artificial Sequence
  source: /note="Description of Artificial Sequence: Synthetic oligonucleotide"
  source: /note="Description of Combined DNA/RNA Molecule: Synthetic oligonucleotide"
  source: /note="DNA/RNA"
  modified_base (1)..(1): bicyclic nucleic acid (BNA)
  modified_base (2)..(2): 5-methyl bicyclic nucleic acid
  modified_base (8)..(8): bicyclic nucleic acid (BNA)
  modified_base (9)..(9): bicyclic nucleic acid (BNA)
tcgguaagt

SEQ ID NO: 20743 - DNA, 20 bp, Artificial Sequence
  source: /note="Description of Artificial Sequence: Synthetic oligonucleotide"
  source: /note="Description of Combined DNA/RNA Molecule: Synthetic oligonucleotide"
  source: /note="DNA/RNA"
  modified_base (1)..(1): bicyclic nucleic acid (BNA)
  modified_base (2)..(2): bicyclic nucleic acid (BNA)
  modified_base (3)..(3): 5-methyl modified nucleotide
  modified_base (12)..(12): 5-methyl modified nucleotide
  modified_base (16)..(16): 5-methyl modified nucleotide
  modified_base (17)..(17): 5-methyl modified nucleotide
  modified_base (19)..(19): bicyclic nucleic acid (BNA)
  modified_base (20)..(20): bicyclic nucleic acid (BNA)
gtcgguaaguucuguccaag

SEQ ID NO: 20744 - DNA, 19 bp, Artificial Sequence
  source: /note="Description of Artificial Sequence: Synthetic oligonucleotide"
  source: /note="Description of Combined DNA/RNA Molecule: Synthetic oligonucleotide"
  source: /note="DNA/RNA"
  modified_base (1)..(1): bicyclic nucleic acid (BNA)
  modified_base (2)..(2): bicyclic nucleic acid (BNA)
  modified_base (3)..(3): 5-methyl modified nucleotide
  modified_base (12)..(12): 5-methyl modified nucleotide
  modified_base (16)..(16): 5-methyl modified nucleotide
  modified_base (17)..(17): 5-methyl modified nucleotide
  modified_base (18)..(18): bicyclic nucleic acid (BNA)
  modified_base (19)..(19): bicyclic nucleic acid (BNA)
gtcgguaaguucuguccaa

SEQ ID NO: 20745 - DNA, 18 bp, Artificial Sequence
  source: /note="Description of Artificial Sequence: Synthetic oligonucleotide"
  source: /note="Description of Combined DNA/RNA Molecule: Synthetic oligonucleotide"
  source: /note="DNA/RNA"
  modified_base (1)..(1): bicyclic nucleic acid (BNA)
  modified_base (2)..(2): bicyclic nucleic acid (BNA)
  modified_base (3)..(3): 5-methyl modified nucleotide
  modified_base (12)..(12): 5-methyl modified nucleotide
  modified_base (16)..(16): 5-methyl modified nucleotide
  modified_base (17)..(17): 5-methyl bicyclic nucleic acid
  modified_base (18)..(18): bicyclic nucleic acid (BNA)
gtcgguaaguucugucca

SEQ ID NO: 20746 - DNA, 17 bp, Artificial Sequence
  source: /note="Description of Artificial Sequence: Synthetic oligonucleotide"
  source: /note="Description of Combined DNA/RNA Molecule: Synthetic oligonucleotide"
  source: /note="DNA/RNA"
  modified_base (1)..(1): bicyclic nucleic acid (BNA)
  modified_base (2)..(2): bicyclic nucleic acid (BNA)
  modified_base (3)..(3): 5-methyl modified nucleotide
  modified_base (12)..(12): 5-methyl modified nucleotide
  modified_base (16)..(16): 5-methyl bicyclic nucleic acid
  modified_base (17)..(17): 5-methyl bicyclic nucleic acid
gtcgguaaguucugucc

SEQ ID NO: 20747 - DNA, 16 bp, Artificial Sequence
  source: /note="Description of Artificial Sequence: Synthetic oligonucleotide"
  source: /note="Description of Combined DNA/RNA Molecule: Synthetic oligonucleotide"
  source: /note="DNA/RNA"
  modified_base (1)..(1): bicyclic nucleic acid (BNA)
  modified_base (2)..(2): bicyclic nucleic acid (BNA)
  modified_base (3)..(3): 5-methyl modified nucleotide
  modified_base (12)..(12): 5-methyl modified nucleotide
  modified_base (15)..(15): bicyclic nucleic acid (BNA)
  modified_base (16)..(16): 5-methyl bicyclic nucleic acid
gtcgguaaguucugtc

SEQ ID NO: 20748 - DNA, 15 bp, Artificial Sequence
  source: /note="Description of Artificial Sequence: Synthetic oligonucleotide"
  source: /note="Description of Combined DNA/RNA Molecule: Synthetic oligonucleotide"
  source: /note="DNA/RNA"
  modified_base (1)..(1): bicyclic nucleic acid (BNA)
  modified_base (2)..(2): bicyclic nucleic acid (BNA)
  modified_base (3)..(3): 5-methyl modified nucleotide
  modified_base (12)..(12): 5-methyl modified nucleotide
  modified_base (14)..(14): bicyclic nucleic acid (BNA)
  modified_base (15)..(15): bicyclic nucleic acid (BNA)
gtcgguaaguucugt

SEQ ID NO: 20749 - DNA, 14 bp, Artificial Sequence
  source: /note="Description of Artificial Sequence: Synthetic oligonucleotide"
  source: /note="Description of Combined DNA/RNA Molecule: Synthetic oligonucleotide"
  source: /note="DNA/RNA"
  modified_base (1)..(1): bicyclic nucleic acid (BNA)
  modified_base (2)..(2): bicyclic nucleic acid (BNA)
  modified_base (3)..(3): 5-methyl modified nucleotide
  modified_base (12)..(12): 5-methyl modified nucleotide
  modified_base (13)..(13): bicyclic nucleic acid (BNA)
  modified_base (14)..(14): bicyclic nucleic acid (BNA)
gtcgguaaguuctg

SEQ ID NO: 20750 - DNA, 13 bp, Artificial Sequence
  source: /note="Description of Artificial Sequence: Synthetic oligonucleotide"
  source: /note="Description of Combined DNA/RNA Molecule: Synthetic oligonucleotide"
  source: /note="DNA/RNA"
  modified_base (1)..(1): bicyclic nucleic acid (BNA)
  modified_base (2)..(2): bicyclic nucleic acid (BNA)
  modified_base (3)..(3): 5-methyl modified nucleotide
  modified_base (12)..(12): 5-methyl bicyclic nucleic acid
  modified_base (13)..(13): bicyclic nucleic acid (BNA)
gtcgguaaguuct

SEQ ID NO: 20751 - DNA, 12 bp, Artificial Sequence
  source: /note="Description of Artificial Sequence: Synthetic oligonucleotide"
  source: /note="Description of Combined DNA/RNA Molecule: Synthetic oligonucleotide"
  source: /note="DNA/RNA"
  modified_base (1)..(1): bicyclic nucleic acid (BNA)
  modified_base (2)..(2): bicyclic nucleic acid (BNA)
  modified_base (3)..(3): 5-methyl modified nucleotide
  modified_base (11)..(11): bicyclic nucleic acid (BNA)
  modified_base (12)..(12): 5-methyl bicyclic nucleic acid
gtcgguaagutc

SEQ ID NO: 20752 - DNA, 11 bp, Artificial Sequence
  source: /note="Description of Artificial Sequence: Synthetic oligonucleotide"
  source: /note="Description of Combined DNA/RNA Molecule: Synthetic oligonucleotide"
  source: /note="DNA/RNA"
  modified_base (1)..(1): bicyclic nucleic acid (BNA)
  modified_base (2)..(2): bicyclic nucleic acid (BNA)
  modified_base (3)..(3): 5-methyl modified nucleotide
  modified_base (10)..(10): bicyclic nucleic acid (BNA)
  modified_base (11)..(11): bicyclic nucleic acid (BNA)
gtcgguaagtt

SEQ ID NO: 20753 - DNA, 10 bp, Artificial Sequence
  source: /note="Description of Artificial Sequence: Synthetic oligonucleotide"
  source: /note="Description of Combined DNA/RNA Molecule: Synthetic oligonucleotide"
  source: /note="DNA/RNA"
  modified_base (1)..(1): bicyclic nucleic acid (BNA)
  modified_base (2)..(2): bicyclic nucleic acid (BNA)
  modified_base (3)..(3): 5-methyl modified nucleotide
  modified_base (9)..(9): bicyclic nucleic acid (BNA)
  modified_base (10)..(10): bicyclic nucleic acid (BNA)
gtcgguaagt

SEQ ID NO: 20754 - RNA, 20 nt, Artificial Sequence
  source: /note="Description of Artificial Sequence: Synthetic oligonucleotide"
  source: /note="RNA"
  modified_base (1)..(1): bicyclic nucleic acid (BNA)
  modified_base (2)..(2): bicyclic nucleic acid (BNA)
  modified_base (4)..(4): 5-methyl modified nucleotide
  modified_base (13)..(13): 5-methyl modified nucleotide
  modified_base (17)..(17): 5-methyl modified nucleotide
  modified_base (18)..(18): 5-methyl modified nucleotide
  modified_base (19)..(19): bicyclic nucleic acid (BNA)
  modified_base (20)..(20): bicyclic nucleic acid (BNA)
agucgguaaguucuguccaa

SEQ ID NO: 20755 - RNA, 19 nt, Artificial Sequence
  source: /note="Description of Artificial Sequence: Synthetic oligonucleotide"
  source: /note="RNA"
  modified_base (1)..(1): bicyclic nucleic acid (BNA)
  modified_base (2)..(2): bicyclic nucleic acid (BNA)
  modified_base (4)..(4): 5-methyl modified nucleotide
  modified_base (13)..(13): 5-methyl modified nucleotide
  modified_base (17)..(17): 5-methyl modified nucleotide
  modified_base (18)..(18): 5-methyl bicyclic nucleic acid
  modified_base (19)..(19): bicyclic nucleic acid (BNA)
agucgguaaguucugucca

SEQ ID NO: 20756 - DNA, 17 bp, Artificial Sequence
  source: /note="Description of Artificial Sequence: Synthetic oligonucleotide"
  source: /note="Description of Combined DNA/RNA Molecule: Synthetic oligonucleotide"
  source: /note="DNA/RNA"
  modified_base (1)..(1): bicyclic nucleic acid (BNA)
  modified_base (2)..(2): bicyclic nucleic acid (BNA)
  modified_base (4)..(4): 5-methyl modified nucleotide
  modified_base (13)..(13): 5-methyl modified nucleotide
  modified_base (16)..(16): bicyclic nucleic acid (BNA)
  modified_base (17)..(17): 5-methyl bicyclic nucleic acid
agucgguaaguucugtc

SEQ ID NO: 20757 - DNA, 16 bp, Artificial Sequence
  source: /note="Description of Artificial Sequence: Synthetic oligonucleotide"
  source: /note="Description of Combined DNA/RNA Molecule: Synthetic oligonucleotide"
  source: /note="DNA/RNA"
  modified_base (1)..(1): bicyclic nucleic acid (BNA)
  modified_base (2)..(2): bicyclic nucleic acid (BNA)
  modified_base (4)..(4): 5-methyl modified nucleotide
  modified_base (13)..(13): 5-methyl modified nucleotide
  modified_base (15)..(15): bicyclic nucleic acid (BNA)
  modified_base (16)..(16): bicyclic nucleic acid (BNA)
agucgguaaguucugt

SEQ ID NO: 20758 - DNA, 15 bp, Artificial Sequence
  source: /note="Description of Artificial Sequence: Synthetic oligonucleotide"
  source: /note="Description of Combined DNA/RNA Molecule: Synthetic oligonucleotide"
  source: /note="DNA/RNA"
  modified_base (1)..(1): bicyclic nucleic acid (BNA)
  modified_base (2)..(2): bicyclic nucleic acid (BNA)
  modified_base (4)..(4): 5-methyl modified nucleotide
  modified_base (13)..(13): 5-methyl modified nucleotide
  modified_base (14)..(14): bicyclic nucleic acid (BNA)
  modified_base (15)..(15): bicyclic nucleic acid (BNA)
agucgguaaguuctg

SEQ ID NO: 20759 - DNA, 14 bp, Artificial Sequence
  source: /note="Description of Artificial Sequence: Synthetic oligonucleotide"
  source: /note="Description of Combined DNA/RNA Molecule: Synthetic oligonucleotide"
  source: /note="DNA/RNA"
  modified_base (1)..(1): bicyclic nucleic acid (BNA)
  modified_base (2)..(2): bicyclic nucleic acid (BNA)
  modified_base (4)..(4): 5-methyl modified nucleotide
  modified_base (13)..(13): 5-methyl bicyclic nucleic acid
  modified_base (14)..(14): bicyclic nucleic acid (BNA)
agucgguaaguuct

SEQ ID NO: 20760 - DNA, 13 bp, Artificial Sequence
  source: /note="Description of Artificial Sequence: Synthetic oligonucleotide"
  source: /note="Description of Combined DNA/RNA Molecule: Synthetic oligonucleotide"
  source: /note="DNA/RNA"
  modified_base (1)..(1): bicyclic nucleic acid (BNA)
  modified_base (2)..(2): bicyclic nucleic acid (BNA)
  modified_base (4)..(4): 5-methyl modified nucleotide
  modified_base (12)..(12): bicyclic nucleic acid (BNA)
  modified_base (13)..(13): 5-methyl bicyclic nucleic acid
agucgguaagutc

SEQ ID NO: 20761 - DNA, 12 bp, Artificial Sequence
  source: /note="Description of Artificial Sequence: Synthetic oligonucleotide"
  source: /note="Description of Combined DNA/RNA Molecule: Synthetic oligonucleotide"
  source: /note="DNA/RNA"
  modified_base (1)..(1): bicyclic nucleic acid (BNA)
  modified_base (2)..(2): bicyclic nucleic acid (BNA)
  modified_base (4)..(4): 5-methyl modified nucleotide
  modified_base (11)..(11): bicyclic nucleic acid (BNA)
  modified_base (12)..(12): bicyclic nucleic acid (BNA)
agucgguaagtt

SEQ ID NO: 20762 - DNA, 11 bp, Artificial Sequence
  source: /note="Description of Artificial Sequence: Synthetic oligonucleotide"
  source: /note="Description of Combined DNA/RNA Molecule: Synthetic oligonucleotide"
  source: /note="DNA/RNA"
  modified_base (1)..(1): bicyclic nucleic acid (BNA)
  modified_base (2)..(2): bicyclic nucleic acid (BNA)
  modified_base (4)..(4): 5-methyl modified nucleotide
  modified_base (10)..(10): bicyclic nucleic acid (BNA)
  modified_base (11)..(11): bicyclic nucleic acid (BNA)
agucgguaagt

SEQ ID NO: 20763 - RNA, 20 nt, Artificial Sequence
  source: /note="Description of Artificial Sequence: Synthetic oligonucleotide"
  source: /note="RNA"
  modified_base (1)..(1): 5-methyl bicyclic nucleic acid
  modified_base (2)..(2): bicyclic nucleic acid (BNA)
  modified_base (5)..(5): 5-methyl modified nucleotide
  modified_base (14)..(14): 5-methyl modified nucleotide
  modified_base (18)..(18): 5-methyl modified nucleotide
  modified_base (19)..(19): 5-methyl bicyclic nucleic acid
  modified_base (20)..(20): bicyclic nucleic acid (BNA)
cagucgguaaguucugucca

SEQ ID NO: 20764 - RNA, 19 nt, Artificial Sequence
  source: /note="Description of Artificial Sequence: Synthetic oligonucleotide"
  source: /note="RNA"
  modified_base (1)..(1): 5-methyl bicyclic nucleic acid
  modified_base (2)..(2): bicyclic nucleic acid (BNA)
  modified_base (5)..(5): 5-methyl modified nucleotide
  modified_base (14)..(14): 5-methyl modified nucleotide
  modified_base (18)..(18): 5-methyl bicyclic nucleic acid
  modified_base (19)..(19): 5-methyl bicyclic nucleic acid
cagucgguaaguucugucc

SEQ ID NO: 20765 - DNA, 18 bp, Artificial Sequence
  source: /note="Description of Artificial Sequence: Synthetic oligonucleotide"
  source: /note="Description of Combined DNA/RNA Molecule: Synthetic oligonucleotide"
  source: /note="DNA/RNA"
  modified_base (1)..(1): 5-methyl bicyclic nucleic acid
  modified_base (2)..(2): bicyclic nucleic acid (BNA)
  modified_base (5)..(5): 5-methyl modified nucleotide
  modified_base (14)..(14): 5-methyl modified nucleotide
  modified_base (17)..(17): bicyclic nucleic acid (BNA)
  modified_base (18)..(18): 5-methyl bicyclic nucleic acid
cagucgguaaguucugtc

SEQ ID NO: 20766 - DNA, 17 bp, Artificial Sequence
  source: /note="Description of Artificial Sequence: Synthetic oligonucleotide"
  source: /note="Description of Combined DNA/RNA Molecule: Synthetic oligonucleotide"
  source: /note="DNA/RNA"
  modified_base (1)..(1): 5-methyl bicyclic nucleic acid
  modified_base (2)..(2): bicyclic nucleic acid (BNA)
  modified_base (5)..(5): 5-methyl modified nucleotide
  modified_base (14)..(14): 5-methyl modified nucleotide
  modified_base (16)..(16): bicyclic nucleic acid (BNA)
  modified_base (17)..(17): bicyclic nucleic acid (BNA)
cagucgguaaguucugt

SEQ ID NO: 20767 - DNA, 16 bp, Artificial Sequence
  source: /note="Description of Artificial Sequence: Synthetic oligonucleotide"
  source: /note="Description of Combined DNA/RNA Molecule: Synthetic oligonucleotide"
  source: /note="DNA/RNA"
  modified_base (1)..(1): 5-methyl bicyclic nucleic acid
  modified_base (2)..(2): bicyclic nucleic acid (BNA)
  modified_base (5)..(5): 5-methyl modified nucleotide
  modified_base (14)..(14): 5-methyl modified nucleotide
  modified_base (15)..(15): bicyclic nucleic acid (BNA)
  modified_base (16)..(16): bicyclic nucleic acid (BNA)
cagucgguaaguuctg

SEQ ID NO: 20768 - DNA, 15 bp, Artificial Sequence
  source: /note="Description of Artificial Sequence: Synthetic oligonucleotide"
  source: /note="Description of Combined DNA/RNA Molecule: Synthetic oligonucleotide"
  source: /note="DNA/RNA"
  modified_base (1)..(1): 5-methyl bicyclic nucleic acid
  modified_base (2)..(2): bicyclic nucleic acid (BNA)
  modified_base (5)..(5): 5-methyl modified nucleotide
  modified_base (14)..(14): 5-methyl bicyclic nucleic acid
  modified_base (15)..(15): bicyclic nucleic acid (BNA)
cagucgguaaguuct

SEQ ID NO: 20769 - DNA, 14 bp, Artificial Sequence
  source: /note="Description of Artificial Sequence: Synthetic oligonucleotide"
  source: /note="Description of Combined DNA/RNA Molecule: Synthetic oligonucleotide"
  source: /note="DNA/RNA"
  modified_base (1)..(1): 5-methyl bicyclic nucleic acid
  modified_base (2)..(2): bicyclic nucleic acid (BNA)
  modified_base (5)..(5): 5-methyl modified nucleotide
  modified_base (13)..(13): bicyclic nucleic acid (BNA)
  modified_base (14)..(14): 5-methyl bicyclic nucleic acid
cagucgguaagutc

SEQ ID NO: 20770 - DNA, 13 bp, Artificial Sequence
  source: /note="Description of Artificial Sequence: Synthetic oligonucleotide"
  source: /note="Description of Combined DNA/RNA Molecule: Synthetic oligonucleotide"
  source: /note="DNA/RNA"
  modified_base (1)..(1): 5-methyl bicyclic nucleic acid
  modified_base (2)..(2): bicyclic nucleic acid (BNA)
  modified_base (5)..(5): 5-methyl modified nucleotide
  modified_base (12)..(12): bicyclic nucleic acid (BNA)
  modified_base (13)..(13): bicyclic nucleic acid (BNA)
cagucgguaagtt

SEQ ID NO: 20771 - DNA, 12 bp, Artificial Sequence
  source: /note="Description of Artificial Sequence: Synthetic oligonucleotide"
  source: /note="Description of Combined DNA/RNA Molecule: Synthetic oligonucleotide"
  source: /note="DNA/RNA"
  modified_base (1)..(1): 5-methyl bicyclic nucleic acid
  modified_base (2)..(2): bicyclic nucleic acid (BNA)
  modified_base (5)..(5): 5-methyl modified nucleotide
  modified_base (11)..(11): bicyclic nucleic acid (BNA)
  modified_base (12)..(12): bicyclic nucleic acid (BNA)
cagucgguaagt

SEQ ID NO: 20772 - RNA, 20 nt, Artificial Sequence
  source: /note="Description of Artificial Sequence: Synthetic oligonucleotide"
  source: /note="RNA"
  modified_base (1)..(1): 5-methyl bicyclic nucleic acid
  modified_base (2)..(2): 5-methyl bicyclic nucleic acid
  modified_base (6)..(6): 5-methyl modified nucleotide
  modified_base (15)..(15): 5-methyl modified nucleotide
  modified_base (19)..(19): 5-methyl bicyclic nucleic acid
  modified_base (20)..(20): 5-methyl bicyclic nucleic acid
ccagucgguaaguucugucc

SEQ ID NO: 20773 - DNA, 19 bp, Artificial Sequence
  source: /note="Description of Artificial Sequence: Synthetic oligonucleotide"
  source: /note="Description of Combined DNA/RNA Molecule: Synthetic oligonucleotide"
  source: /note="DNA/RNA"
  modified_base (1)..(1): 5-methyl bicyclic nucleic acid
  modified_base (2)..(2): 5-methyl bicyclic nucleic acid
  modified_base (6)..(6): 5-methyl modified nucleotide
  modified_base (15)..(15): 5-methyl modified nucleotide
  modified_base (18)..(18): bicyclic nucleic acid (BNA)
  modified_base (19)..(19): 5-methyl bicyclic nucleic acid
ccagucgguaaguucugtc

SEQ ID NO: 20774 - DNA, 18 bp, Artificial Sequence
  source: /note="Description of Artificial Sequence: Synthetic oligonucleotide"
  source: /note="Description of Combined DNA/RNA Molecule: Synthetic oligonucleotide"
  source: /note="DNA/RNA"
  modified_base (1)..(1): 5-methyl bicyclic nucleic acid
  modified_base (2)..(2): 5-methyl bicyclic nucleic acid
  modified_base (6)..(6): 5-methyl modified nucleotide
  modified_base (15)..(15): 5-methyl modified nucleotide
  modified_base (17)..(17): bicyclic nucleic acid (BNA)
  modified_base (18)..(18): bicyclic nucleic acid (BNA)
ccagucgguaaguucugt

SEQ ID NO: 20775 - DNA, 17 bp, Artificial Sequence
  source: /note="Description of Artificial Sequence: Synthetic oligonucleotide"
  source: /note="Description of Combined DNA/RNA Molecule: Synthetic oligonucleotide"
  source: /note="DNA/RNA"
  modified_base (1)..(1): 5-methyl bicyclic nucleic acid
  modified_base (2)..(2): 5-methyl bicyclic nucleic acid
  modified_base (6)..(6): 5-methyl modified nucleotide
  modified_base (15)..(15): 5-methyl modified nucleotide
  modified_base (16)..(16): bicyclic nucleic acid (BNA)
  modified_base (17)..(17): bicyclic nucleic acid (BNA)
ccagucgguaaguuctg

SEQ ID NO: 20776 - DNA, 16 bp, Artificial Sequence
  source: /note="Description of Artificial Sequence: Synthetic oligonucleotide"
  source: /note="Description of Combined DNA/RNA Molecule: Synthetic oligonucleotide"
  source: /note="DNA/RNA"
  modified_base (1)..(1): 5-methyl bicyclic nucleic acid
  modified_base (2)..(2): 5-methyl bicyclic nucleic acid
  modified_base (6)..(6): 5-methyl modified nucleotide
  modified_base (15)..(15): 5-methyl bicyclic nucleic acid
  modified_base (16)..(16): bicyclic nucleic acid (BNA)
ccagucgguaaguuct

SEQ ID NO: 20777 - DNA, 15 bp, Artificial Sequence
  source: /note="Description of Artificial Sequence: Synthetic oligonucleotide"
  source: /note="Description of Combined DNA/RNA Molecule: Synthetic oligonucleotide"
  source: /note="DNA/RNA"
  modified_base (1)..(1): 5-methyl bicyclic nucleic acid
  modified_base (2)..(2): 5-methyl bicyclic nucleic acid
  modified_base (6)..(6): 5-methyl modified nucleotide
  modified_base (14)..(14): bicyclic nucleic acid (BNA)
  modified_base (15)..(15): 5-methyl bicyclic nucleic acid
ccagucgguaagutc

SEQ ID NO: 20778 - DNA, 14 bp, Artificial Sequence
  source: /note="Description of Artificial Sequence: Synthetic oligonucleotide"
  source: /note="Description of Combined DNA/RNA Molecule: Synthetic oligonucleotide"
  source: /note="DNA/RNA"
  modified_base (1)..(1): 5-methyl bicyclic nucleic acid
  modified_base (2)..(2): 5-methyl bicyclic nucleic acid
  modified_base (6)..(6): 5-methyl modified nucleotide
  modified_base (13)..(13): bicyclic nucleic acid (BNA)
  modified_base (14)..(14): bicyclic nucleic acid (BNA)
ccagucgguaagtt

SEQ ID NO: 20779 - DNA, 13 bp, Artificial Sequence
  source: /note="Description of Artificial Sequence: Synthetic oligonucleotide"
  source: /note="Description of Combined DNA/RNA Molecule: Synthetic oligonucleotide"
  source: /note="DNA/RNA"
  modified_base (1)..(1): 5-methyl bicyclic nucleic acid
  modified_base (2)..(2): 5-methyl bicyclic nucleic acid
  modified_base (6)..(6): 5-methyl modified nucleotide
  modified_base (12)..(12): bicyclic nucleic acid (BNA)
  modified_base (13)..(13): bicyclic nucleic acid (BNA)
ccagucgguaagt

SEQ ID NO: 20780 - DNA, 20 bp, Artificial Sequence
  source: /note="Description of Artificial Sequence: Synthetic oligonucleotide"
  source: /note="Description of Combined DNA/RNA Molecule: Synthetic oligonucleotide"
  source: /note="DNA/RNA"
  modified_base (1)..(1): bicyclic nucleic acid (BNA)
  modified_base (2)..(2): 5-methyl bicyclic nucleic acid
  modified_base (3)..(3): 5-methyl modified nucleotide
  modified_base (7)..(7): 5-methyl modified nucleotide
  modified_base (16)..(16): 5-methyl modified nucleotide
  modified_base (19)..(19): bicyclic nucleic acid (BNA)
  modified_base (20)..(20): 5-methyl bicyclic nucleic acid
gccagucgguaaguucugtc

SEQ ID NO: 20781 - DNA, 19 bp, Artificial Sequence
  source: /note="Description of Artificial Sequence: Synthetic oligonucleotide"
  source: /note="Description of Combined DNA/RNA Molecule: Synthetic oligonucleotide"
  source: /note="DNA/RNA"
  modified_base (1)..(1): bicyclic nucleic acid (BNA)
  modified_base (2)..(2): 5-methyl bicyclic nucleic acid
  modified_base (3)..(3): 5-methyl modified nucleotide
  modified_base (7)..(7): 5-methyl modified nucleotide
  modified_base (16)..(16): 5-methyl modified nucleotide
  modified_base (18)..(18): bicyclic nucleic acid (BNA)
  modified_base (19)..(19): bicyclic nucleic acid (BNA)
gccagucgguaaguucugt

SEQ ID NO: 20782 - DNA, 18 bp, Artificial Sequence
  source: /note="Description of Artificial Sequence: Synthetic oligonucleotide"
  source: /note="Description of Combined DNA/RNA Molecule: Synthetic oligonucleotide"
  source: /note="DNA/RNA"
  modified_base (1)..(1): bicyclic nucleic acid (BNA)
  modified_base (2)..(2): 5-methyl bicyclic nucleic acid
  modified_base (3)..(3): 5-methyl modified nucleotide
  modified_base (7)..(7): 5-methyl modified nucleotide
  modified_base (16)..(16): 5-methyl modified nucleotide
  modified_base (17)..(17): bicyclic nucleic acid (BNA)
  modified_base (18)..(18): bicyclic nucleic acid (BNA)
gccagucgguaaguuctg

SEQ ID NO: 20783 - DNA, 17 bp, Artificial Sequence
  source: /note="Description of Artificial Sequence: Synthetic oligonucleotide"
  source: /note="Description of Combined DNA/RNA Molecule: Synthetic oligonucleotide"
  source: /note="DNA/RNA"
  modified_base (1)..(1): bicyclic nucleic acid (BNA)
  modified_base (2)..(2): 5-methyl bicyclic nucleic acid
  modified_base (3)..(3): 5-methyl modified nucleotide
  modified_base (7)..(7): 5-methyl modified nucleotide
  modified_base (16)..(16): 5-methyl bicyclic nucleic acid
  modified_base (17)..(17): bicyclic nucleic acid (BNA)
gccagucgguaaguuct

SEQ ID NO: 20784 - DNA, 16 bp, Artificial Sequence
  source: /note="Description of Artificial Sequence: Synthetic oligonucleotide"
  source: /note="Description of Combined DNA/RNA Molecule: Synthetic oligonucleotide"
  source: /note="DNA/RNA"
  modified_base (1)..(1): bicyclic nucleic acid (BNA)
  modified_base (2)..(2): 5-methyl bicyclic nucleic acid
  modified_base (3)..(3): 5-methyl modified nucleotide
  modified_base (7)..(7): 5-methyl modified nucleotide
  modified_base (15)..(15): bicyclic nucleic acid (BNA)
  modified_base (16)..(16): 5-methyl bicyclic nucleic acid
gccagucgguaagutc

SEQ ID NO: 20785 - DNA, 15 bp, Artificial Sequence
  source: /note="Description of Artificial Sequence: Synthetic oligonucleotide"
  source: /note="Description of Combined DNA/RNA Molecule: Synthetic oligonucleotide"
  source: /note="DNA/RNA"
  modified_base (1)..(1): bicyclic nucleic acid (BNA)
  modified_base (2)..(2): 5-methyl bicyclic nucleic acid
  modified_base (3)..(3): 5-methyl modified nucleotide
  modified_base (7)..(7): 5-methyl modified nucleotide
  modified_base (14)..(14): bicyclic nucleic acid (BNA)
  modified_base (15)..(15): bicyclic nucleic acid (BNA)
gccagucgguaagtt

SEQ ID NO: 20786 - DNA, 14 bp, Artificial Sequence
  source: /note="Description of Artificial Sequence: Synthetic oligonucleotide"
  source: /note="Description of Combined DNA/RNA Molecule: Synthetic oligonucleotide"
  source: /note="DNA/RNA"
  modified_base (1)..(1): bicyclic nucleic acid (BNA)
  modified_base (2)..(2): 5-methyl bicyclic nucleic acid
  modified_base (3)..(3): 5-methyl modified nucleotide
  modified_base (7)..(7): 5-methyl modified nucleotide
  modified_base (13)..(13): bicyclic nucleic acid (BNA)
  modified_base (14)..(14): bicyclic nucleic acid (BNA)
gccagucgguaagt

SEQ ID NO: 20787 - DNA, 20 bp, Artificial Sequence
  source: /note="Description of Artificial Sequence: Synthetic oligonucleotide"
  source: /note="Description of Combined DNA/RNA Molecule: Synthetic oligonucleotide"
  source: /note="DNA/RNA"
  modified_base (1)..(1): bicyclic nucleic acid (BNA)
  modified_base (2)..(2): 5-methyl bicyclic nucleic acid
  modified_base (14)..(14): 5-methyl modified nucleotide
  modified_base (19)..(19): 5-methyl bicyclic nucleic acid
  modified_base (20)..(20): bicyclic nucleic acid (BNA)
tcaaggaagauggcauuuct

SEQ ID NO: 20788 - DNA, 22 bp, Artificial Sequence
  source: /note="Description of Artificial Sequence: Synthetic oligonucleotide"
  source: /note="Description of Combined DNA/RNA Molecule: Synthetic oligonucleotide"
  source: /note="DNA/RNA"
  modified_base (1)..(1): bicyclic nucleic acid (BNA)
  modified_base (2)..(2): 5-methyl bicyclic nucleic acid
  modified_base (14)..(14): 5-methyl modified nucleotide
  modified_base (19)..(19): 5-methyl modified nucleotide
  modified_base (21)..(21): bicyclic nucleic acid (BNA)
  modified_base (22)..(22): bicyclic nucleic acid (BNA)
tcaaggaagauggcauuucuag

SEQ ID NO: 20789 - DNA, 16 bp, Artificial Sequence
  source: /note="Description of Artificial Sequence: Synthetic oligonucleotide"
  source: /note="Description of Combined DNA/RNA Molecule: Synthetic oligonucleotide"
  source: /note="DNA/RNA"
  modified_base (1)..(1): bicyclic nucleic acid (BNA)
  modified_base (2)..(2): 5-methyl bicyclic nucleic acid
  modified_base (14)..(14): 5-methyl modified nucleotide
  modified_base (15)..(15): bicyclic nucleic acid (BNA)
  modified_base (16)..(16): bicyclic nucleic acid (BNA)
tcaaggaagauggcat

SEQ ID NO: 20790 - DNA, 15 bp, Artificial Sequence
  source: /note="Description of Artificial Sequence: Synthetic oligonucleotide"
  source: /note="Description of Combined DNA/RNA Molecule: Synthetic oligonucleotide"
  source: /note="DNA/RNA"
  modified_base (1)..(1): bicyclic nucleic acid (BNA)
  modified_base (2)..(2): bicyclic nucleic acid (BNA)
  modified_base (9)..(9): 5-methyl modified nucleotide
  modified_base (14)..(14): 5-methyl bicyclic nucleic acid
  modified_base (15)..(15): bicyclic nucleic acid (BNA)
gaagauggcauuuct

SEQ ID NO: 20791 - DNA, 21 bp, Artificial Sequence
  source: /note="Description of Artificial Sequence: Synthetic oligonucleotide"
  source: /note="Description of Combined DNA/RNA Molecule: Synthetic oligonucleotide"
  source: /note="DNA/RNA"
  modified_base (1)..(1): bicyclic nucleic acid (BNA)
  modified_base (2)..(2): 5-methyl bicyclic nucleic acid
  modified_base (14)..(14): 5-methyl modified nucleotide
  modified_base (19)..(19): 5-methyl modified nucleotide
  modified_base (20)..(20): bicyclic nucleic acid (BNA)
  modified_base (21)..(21): bicyclic nucleic acid (BNA)
tcaaggaagauggcauuucta

SEQ ID NO: 20792 - DNA, 19 bp, Artificial Sequence
  source: /note="Description of Artificial Sequence: Synthetic oligonucleotide"
  source: /note="Description of Combined DNA/RNA Molecule: Synthetic oligonucleotide"
  source: /note="DNA/RNA"
  modified_base (1)..(1): bicyclic nucleic acid (BNA)
  modified_base (2)..(2): 5-methyl bicyclic nucleic acid
  modified_base (14)..(14): 5-methyl modified nucleotide
  modified_base (18)..(18): bicyclic nucleic acid (BNA)
  modified_base (19)..(19): 5-methyl bicyclic nucleic acid
tcaaggaagauggcauutc

SEQ ID NO: 20793 - DNA, 18 bp, Artificial Sequence
  source: /note="Description of Artificial Sequence: Synthetic oligonucleotide"
  source: /note="Description of Combined DNA/RNA Molecule: Synthetic oligonucleotide"
  source: /note="DNA/RNA"
  modified_base (1)..(1): bicyclic nucleic acid (BNA)
  modified_base (2)..(2): 5-methyl bicyclic nucleic acid
  modified_base (14)..(14): 5-methyl modified nucleotide
  modified_base (17)..(17): bicyclic nucleic acid (BNA)
  modified_base (18)..(18): bicyclic nucleic acid (BNA)
tcaaggaagauggcautt

SEQ ID NO: 20794 - DNA, 17 bp, Artificial Sequence
  source: /note="Description of Artificial Sequence: Synthetic oligonucleotide"
  source: /note="Description of Combined DNA/RNA Molecule: Synthetic oligonucleotide"
  source: /note="DNA/RNA"
  modified_base (1)..(1): bicyclic nucleic acid (BNA)
  modified_base (2)..(2): 5-methyl bicyclic nucleic acid
  modified_base (14)..(14): 5-methyl modified nucleotide
  modified_base (16)..(16): bicyclic nucleic acid (BNA)
  modified_base (17)..(17): bicyclic nucleic acid (BNA)
tcaaggaagauggcatt

SEQ ID NO: 20795 - DNA, 15 bp, Artificial Sequence
  source: /note="Description of Artificial Sequence: Synthetic oligonucleotide"
  source: /note="Description of Combined DNA/RNA Molecule: Synthetic oligonucleotide"
  source: /note="DNA/RNA"
  modified_base (1)..(1): bicyclic nucleic acid (BNA)
  modified_base (2)..(2): 5-methyl bicyclic nucleic acid
  modified_base (14)..(14): 5-methyl bicyclic nucleic acid
  modified_base (15)..(15): bicyclic nucleic acid (BNA)
tcaaggaagauggca

SEQ ID NO: 20796 - DNA, 14 bp, Artificial Sequence
  source: /note="Description of Artificial Sequence: Synthetic oligonucleotide"
  source: /note="Description of Combined DNA/RNA Molecule: Synthetic oligonucleotide"
  source: /note="DNA/RNA"
  modified_base (1)..(1): bicyclic nucleic acid (BNA)
  modified_base (2)..(2): 5-methyl bicyclic nucleic acid
  modified_base (13)..(13): bicyclic nucleic acid (BNA)
  modified_base (14)..(14): 5-methyl bicyclic nucleic acid
tcaaggaagauggc

SEQ ID NO: 20797 - DNA, 13 bp, Artificial Sequence
  source: /note="Description of Artificial Sequence: Synthetic oligonucleotide"
  source: /note="Description of Combined DNA/RNA Molecule: Synthetic oligonucleotide"
  source: /note="DNA/RNA"
  modified_base (1)..(1): bicyclic nucleic acid (BNA)
  modified_base (2)..(2): 5-methyl bicyclic nucleic acid
  modified_base (12)..(12): bicyclic nucleic acid (BNA)
  modified_base (13)..(13): bicyclic nucleic acid (BNA)
tcaaggaagaugg

SEQ ID NO: 20798 - DNA, 12 bp, Artificial Sequence
  source: /note="Description of Artificial Sequence: Synthetic oligonucleotide"
  source: /note="DNA/RNA"
  modified_base (1)..(1): bicyclic nucleic acid (BNA)
  modified_base (2)..(2): 5-methyl bicyclic nucleic acid
  modified_base (11)..(11): bicyclic nucleic acid (BNA)
  modified_base (12)..(12): bicyclic nucleic acid (BNA)
tcaaggaagatg

SEQ ID NO: 20799 - DNA, 11 bp, Artificial Sequence
  source: /note="Description of Artificial Sequence: Synthetic oligonucleotide"
  source: /note="DNA/RNA"
  modified_base (1)..(1): bicyclic nucleic acid (BNA)
  modified_base (2)..(2): 5-methyl bicyclic nucleic acid
  modified_base (10)..(10): bicyclic nucleic acid (BNA)
  modified_base (11)..(11): bicyclic nucleic acid (BNA)
tcaaggaagat

SEQ ID NO: 20800 - DNA, 10 bp, Artificial Sequence
  source: /note="Description of Artificial Sequence: Synthetic oligonucleotide"
  source: /note="DNA/RNA"
  modified_base (1)..(1): bicyclic nucleic acid (BNA)
  modified_base (2)..(2): 5-methyl bicyclic nucleic acid
  modified_base (9)..(9): bicyclic nucleic acid (BNA)
  modified_base (10)..(10): bicyclic nucleic acid (BNA)
tcaaggaaga

SEQ ID NO: 20801 - DNA, 9 bp, Artificial Sequence
  source: /note="Description of Artificial Sequence: Synthetic oligonucleotide"
  source: /note="DNA/RNA"
  modified_base (1)..(1): bicyclic nucleic acid (BNA)
  modified_base (2)..(2): 5-methyl bicyclic nucleic acid
  modified_base (8)..(8): bicyclic nucleic acid (BNA)
  modified_base (9)..(9): bicyclic nucleic acid (BNA)
tcaaggaag

SEQ ID NO: 20802 - RNA, 21 nt, Artificial Sequence
  source: /note="Description of Artificial Sequence: Synthetic oligonucleotide"
  source: /note="RNA"
  modified_base (1)..(1): 5-methyl bicyclic nucleic acid
  modified_base (2)..(2): bicyclic nucleic acid (BNA)
  modified_base (13)..(13): 5-methyl modified nucleotide
  modified_base (18)..(18): 5-methyl modified nucleotide
  modified_base (20)..(20): bicyclic nucleic acid (BNA)
  modified_base (21)..(21): bicyclic nucleic acid (BNA)
caaggaagauggcauuucuag

SEQ ID NO: 20803 - DNA, 20 bp, Artificial Sequence
  source: /note="Description of Artificial Sequence: Synthetic oligonucleotide"
  source: /note="Description of Combined DNA/RNA Molecule: Synthetic oligonucleotide"
  source: /note="DNA/RNA"
  modified_base (1)..(1): 5-methyl bicyclic nucleic acid
  modified_base (2)..(2): bicyclic nucleic acid (BNA)
  modified_base (13)..(13): 5-methyl modified nucleotide
  modified_base (18)..(18): 5-methyl modified nucleotide
  modified_base (19)..(19): bicyclic nucleic acid (BNA)
  modified_base (20)..(20): bicyclic nucleic acid (BNA)
caaggaagauggcauuucta

SEQ ID NO: 20804 - DNA, 19 bp, Artificial Sequence
  source: /note="Description of Artificial Sequence: Synthetic oligonucleotide"
  source: /note="Description of Combined DNA/RNA Molecule: Synthetic oligonucleotide"
  source: /note="DNA/RNA"
  modified_base (1)..(1): 5-methyl bicyclic nucleic acid
  modified_base (2)..(2): bicyclic nucleic acid (BNA)
  modified_base (13)..(13): 5-methyl modified nucleotide
  modified_base (18)..(18): 5-methyl bicyclic nucleic acid
  modified_base (19)..(19): bicyclic nucleic acid (BNA)
caaggaagauggcauuuct

SEQ ID NO: 20805 - DNA, 18 bp, Artificial Sequence
  source: /note="Description of Artificial Sequence: Synthetic oligonucleotide"
  source: /note="Description of Combined DNA/RNA Molecule: Synthetic oligonucleotide"
  source: /note="DNA/RNA"
  modified_base (1)..(1): 5-methyl bicyclic nucleic acid
  modified_base (2)..(2): bicyclic nucleic acid (BNA)
  modified_base (13)..(13): 5-methyl modified nucleotide
  modified_base (17)..(17): bicyclic nucleic acid (BNA)
  modified_base (18)..(18): 5-methyl bicyclic nucleic acid
caaggaagauggcauutc

SEQ ID NO: 20806 - DNA, 17 bp, Artificial Sequence
  source: /note="Description of Artificial Sequence: Synthetic oligonucleotide"
  source: /note="Description of Combined DNA/RNA Molecule: Synthetic oligonucleotide"
  source: /note="DNA/RNA"
  modified_base (1)..(1): 5-methyl bicyclic nucleic acid
  modified_base (2)..(2): bicyclic nucleic acid (BNA)
  modified_base (13)..(13): 5-methyl modified nucleotide
  modified_base (16)..(16): bicyclic nucleic acid (BNA)
  modified_base (17)..(17): bicyclic nucleic acid (BNA)
caaggaagauggcautt

SEQ ID NO: 20807 - DNA, 16 bp, Artificial Sequence
  source: /note="Description of Artificial Sequence: Synthetic oligonucleotide"
  source: /note="Description of Combined DNA/RNA Molecule: Synthetic oligonucleotide"
  source: /note="DNA/RNA"
  modified_base (1)..(1): 5-methyl bicyclic nucleic acid
  modified_base (2)..(2): bicyclic nucleic acid (BNA)
  modified_base (13)..(13): 5-methyl modified nucleotide
  modified_base (15)..(15): bicyclic nucleic acid (BNA)
  modified_base (16)..(16): bicyclic nucleic acid (BNA)
caaggaagauggcatt

SEQ ID NO: 20808 - DNA, 15 bp, Artificial Sequence
  source: /note="Description of Artificial Sequence: Synthetic oligonucleotide"
  source: /note="Description of Combined DNA/RNA Molecule: Synthetic oligonucleotide"
  source: /note="DNA/RNA"
  modified_base (1)..(1): 5-methyl bicyclic nucleic acid
  modified_base (2)..(2): bicyclic nucleic acid (BNA)
  modified_base (13)..(13): 5-methyl modified nucleotide
  modified_base (14)..(14): bicyclic nucleic acid (BNA)
  modified_base (15)..(15): bicyclic nucleic acid (BNA)
caaggaagauggcat

SEQ ID NO: 20809 - RNA, 14 nt, Artificial Sequence
  source: /note="Description of Artificial Sequence: Synthetic oligonucleotide"
  source: /note="RNA"
  modified_base (1)..(1): 5-methyl bicyclic nucleic acid
  modified_base (2)..(2): bicyclic nucleic acid (BNA)
  modified_base (13)..(13): 5-methyl bicyclic nucleic acid
  modified_base (14)..(14): bicyclic nucleic acid (BNA)
caaggaagauggca

SEQ ID NO: 20810 - RNA, 13 nt, Artificial Sequence
  source: /note="Description of Artificial Sequence: Synthetic oligonucleotide"
  source: /note="RNA"
  modified_base (1)..(1): 5-methyl bicyclic nucleic acid
  modified_base (2)..(2): bicyclic nucleic acid (BNA)
  modified_base (12)..(12): bicyclic nucleic acid (BNA)
  modified_base (13)..(13): 5-methyl bicyclic nucleic acid
caaggaagauggc

SEQ ID NO: 20811 - RNA, 12 nt, Artificial Sequence
  source: /note="Description of Artificial Sequence: Synthetic oligonucleotide"
  source: /note="RNA"
  modified_base (1)..(1): 5-methyl bicyclic nucleic acid
  modified_base (2)..(2): bicyclic nucleic acid (BNA)
  modified_base (11)..(11): bicyclic nucleic acid (BNA)
  modified_base (12)..(12): bicyclic nucleic acid (BNA)
caaggaagaugg

SEQ ID NO: 20812 - DNA, 11 bp, Artificial Sequence
  source: /note="Description of Artificial Sequence: Synthetic oligonucleotide"
  source: /note="DNA/RNA"
  modified_base (1)..(1): 5-methyl bicyclic nucleic acid
  modified_base (2)..(2): bicyclic nucleic acid (BNA)
  modified_base (10)..(10): bicyclic nucleic acid (BNA)
  modified_base (11)..(11): bicyclic nucleic acid (BNA)
caaggaagatg

SEQ ID NO: 20813 - DNA, 10 bp, Artificial Sequence
  source: /note="Description of Artificial Sequence: Synthetic oligonucleotide"
  source: /note="DNA/RNA"
  modified_base (1)..(1): 5-methyl bicyclic nucleic acid
  modified_base (2)..(2): bicyclic nucleic acid (BNA)
  modified_base (9)..(9): bicyclic nucleic acid (BNA)
  modified_base (10)..(10): bicyclic nucleic acid (BNA)
caaggaagat

SEQ ID NO: 20814 - RNA, 9 nt, Artificial Sequence
  source: /note="Description of Artificial Sequence: Synthetic oligonucleotide"
  source: /note="RNA/Antisense Oligonucleotide"
  modified_base (1)..(1): 5-methyl bicyclic nucleic acid
  modified_base (2)..(2): bicyclic nucleic acid (BNA)
  modified_base (8)..(8): bicyclic nucleic acid (BNA)
  modified_base (9)..(9): bicyclic nucleic acid (BNA)
caaggaaga

SEQ ID NO: 20815 - RNA, 8 nt, Artificial Sequence
  source: /note="Description of Artificial Sequence: Synthetic oligonucleotide"
  source: /note="RNA/Antisense Oligonucleotide"
  modified_base (1)..(1): 5-methyl bicyclic nucleic acid
  modified_base (2)..(2): bicyclic nucleic acid (BNA)
  modified_base (7)..(7): bicyclic nucleic acid (BNA)
  modified_base (8)..(8): bicyclic nucleic acid (BNA)
caaggaag

SEQ ID NO: 20816 - RNA, 20 nt, Artificial Sequence
  source: /note="Description of Artificial Sequence: Synthetic oligonucleotide"
  source: /note="RNA"
  modified_base (1)..(1): bicyclic nucleic acid (BNA)
  modified_base (2)..(2): bicyclic nucleic acid (BNA)
  modified_base (12)..(12): 5-methyl modified nucleotide
  modified_base (17)..(17): 5-methyl modified nucleotide
  modified_base (19)..(19): bicyclic nucleic acid (BNA)
  modified_base (20)..(20): bicyclic nucleic acid (BNA)
aaggaagauggcauuucuag

SEQ ID NO: 20817 - DNA, 19 bp, Artificial Sequence
  source: /note="Description of Artificial Sequence: Synthetic oligonucleotide"
  source: /note="Description of Combined DNA/RNA Molecule: Synthetic oligonucleotide"
  source: /note="DNA/RNA"
  modified_base (1)..(1): bicyclic nucleic acid (BNA)
  modified_base (2)..(2): bicyclic nucleic acid (BNA)
  modified_base (12)..(12): 5-methyl modified nucleotide
  modified_base (17)..(17): 5-methyl modified nucleotide
  modified_base (18)..(18): bicyclic nucleic acid (BNA)
  modified_base (19)..(19): bicyclic nucleic acid (BNA)
aaggaagauggcauuucta

SEQ ID NO: 20818 - DNA, 18 bp, Artificial Sequence
  source: /note="Description of Artificial Sequence: Synthetic oligonucleotide"
  source: /note="Description of Combined DNA/RNA Molecule: Synthetic oligonucleotide"
  source: /note="DNA/RNA"
  modified_base (1)..(1): bicyclic nucleic acid (BNA)
  modified_base (2)..(2): bicyclic nucleic acid (BNA)
  modified_base (12)..(12): 5-methyl modified nucleotide
  modified_base (17)..(17): 5-methyl bicyclic nucleic acid
  modified_base (18)..(18): bicyclic nucleic acid (BNA)
aaggaagauggcauuuct

SEQ ID NO: 20819 - DNA, 17 bp, Artificial Sequence
  source: /note="Description of Artificial Sequence: Synthetic oligonucleotide"
  source: /note="Description of Combined DNA/RNA Molecule: Synthetic oligonucleotide"
  source: /note="DNA/RNA"
  modified_base (1)..(1): bicyclic nucleic acid (BNA)
  modified_base (2)..(2): bicyclic nucleic acid (BNA)
  modified_base (12)..(12): 5-methyl modified nucleotide
  modified_base (16)..(16): bicyclic nucleic acid (BNA)
  modified_base (17)..(17): 5-methyl bicyclic nucleic acid
aaggaagauggcauutc

SEQ ID NO: 20820 - DNA, 16 bp, Artificial Sequence
  source: /note="Description of Artificial Sequence: Synthetic oligonucleotide"
  source: /note="Description of Combined DNA/RNA Molecule: Synthetic oligonucleotide"
  source: /note="DNA/RNA"
  modified_base (1)..(1): bicyclic nucleic acid (BNA)
  modified_base (2)..(2): bicyclic nucleic acid (BNA)
  modified_base (12)..(12): 5-methyl modified nucleotide
  modified_base (15)..(15): bicyclic nucleic acid (BNA)
  modified_base (16)..(16): bicyclic nucleic acid (BNA)
aaggaagauggcautt

SEQ ID NO: 20821 - DNA, 15 bp, Artificial Sequence
  source: /note="Description of Artificial Sequence: Synthetic oligonucleotide"
  source: /note="Description of Combined DNA/RNA Molecule: Synthetic oligonucleotide"
  source: /note="DNA/RNA"
  modified_base (1)..(1): bicyclic nucleic acid (BNA)
  modified_base (2)..(2): bicyclic nucleic acid (BNA)
  modified_base (12)..(12): 5-methyl modified nucleotide
  modified_base (14)..(14): bicyclic nucleic acid (BNA)
  modified_base (15)..(15): bicyclic nucleic acid (BNA)
aaggaagauggcatt

SEQ ID NO: 20822 - DNA, 14 bp, Artificial Sequence
  source: /note="Description of Artificial Sequence: Synthetic oligonucleotide"
  source: /note="Description of Combined DNA/RNA Molecule: Synthetic oligonucleotide"
  source: /note="DNA/RNA"
  modified_base (1)..(1): bicyclic nucleic acid (BNA)
  modified_base (2)..(2): bicyclic nucleic acid (BNA)
  modified_base (12)..(12): 5-methyl modified nucleotide
  modified_base (13)..(13): bicyclic nucleic acid (BNA)
  modified_base (14)..(14): bicyclic nucleic acid (BNA)
aaggaagauggcat

SEQ ID NO: 20823 - RNA, 13 nt, Artificial Sequence
  source: /note="Description of Artificial Sequence: Synthetic oligonucleotide"
  source: /note="RNA"
  modified_base (1)..(1): bicyclic nucleic acid (BNA)
  modified_base (2)..(2): bicyclic nucleic acid (BNA)
  modified_base (12)..(12): 5-methyl bicyclic nucleic acid
  modified_base (13)..(13): bicyclic nucleic acid (BNA)
aaggaagauggca

SEQ ID NO: 20824 - RNA, 12 nt, Artificial Sequence
  source: /note="Description of Artificial Sequence: Synthetic oligonucleotide"
  source: /note="RNA"
  modified_base (1)..(1): bicyclic nucleic acid (BNA)
  modified_base (2)..(2): bicyclic nucleic acid (BNA)
  modified_base (11)..(11): bicyclic nucleic acid (BNA)
  modified_base (12)..(12): 5-methyl bicyclic nucleic acid
aaggaagauggc

SEQ ID NO: 20825 - RNA, 11 nt, Artificial Sequence
  source: /note="Description of Artificial Sequence: Synthetic oligonucleotide"
  source: /note="RNA"
  modified_base (1)..(1): bicyclic nucleic acid (BNA)
  modified_base (2)..(2): bicyclic nucleic acid (BNA)
  modified_base (10)..(10): bicyclic nucleic acid (BNA)
  modified_base (11)..(11): bicyclic nucleic acid (BNA)
aaggaagaugg

SEQ ID NO: 20826 - DNA, 10 bp, Artificial Sequence
  source: /note="Description of Artificial Sequence: Synthetic oligonucleotide"
  source: /note="DNA/RNA"
  modified_base (1)..(1): bicyclic nucleic acid (BNA)
  modified_base (2)..(2): bicyclic nucleic acid (BNA)
  modified_base (9)..(9): bicyclic nucleic acid (BNA)
  modified_base (10)..(10): bicyclic nucleic acid (BNA)
aaggaagatg

SEQ ID NO: 20827 - DNA, 9 bp, Artificial Sequence
  source: /note="Description of Artificial Sequence: Synthetic oligonucleotide"
  source: /note="DNA/RNA"
  modified_base (1)..(1): bicyclic nucleic acid (BNA)
  modified_base (2)..(2): bicyclic nucleic acid (BNA)
  modified_base (8)..(8): bicyclic nucleic acid (BNA)
  modified_base (9)..(9): bicyclic nucleic acid (BNA)
aaggaagat

SEQ ID NO: 20828 - RNA, 8 nt, Artificial Sequence
  source: /note="Description of Artificial Sequence: Synthetic oligonucleotide"
  source: /note="RNA/Antisense Oligonucleotide"
  modified_base (1)..(1): bicyclic nucleic acid (BNA)
  modified_base (2)..(2): bicyclic nucleic acid (BNA)
  modified_base (7)..(7): bicyclic nucleic acid (BNA)
  modified_base (8)..(8): bicyclic nucleic acid (BNA)
aaggaaga

SEQ ID NO: 20829 - RNA, 19 nt, Artificial Sequence
  source: /note="Description of Artificial Sequence: Synthetic oligonucleotide"
  source: /note="RNA"
  modified_base (1)..(1): bicyclic nucleic acid (BNA)
  modified_base (2)..(2): bicyclic nucleic acid (BNA)
  modified_base (11)..(11): 5-methyl modified nucleotide
  modified_base (16)..(16): 5-methyl modified nucleotide
  modified_base (18)..(18): bicyclic nucleic acid (BNA)
  modified_base (19)..(19): bicyclic nucleic acid (BNA)
aggaagauggcauuucuag

SEQ ID NO: 20830 - DNA, 18 bp, Artificial Sequence
  source: /note="Description of Artificial Sequence: Synthetic oligonucleotide"
  source: /note="Description of Combined DNA/RNA Molecule: Synthetic oligonucleotide"
  source: /note="DNA/RNA"
  modified_base (1)..(1): bicyclic nucleic acid (BNA)
  modified_base (2)..(2): bicyclic nucleic acid (BNA)
  modified_base (11)..(11): 5-methyl modified nucleotide
  modified_base (16)..(16): 5-methyl modified nucleotide
  modified_base (17)..(17): bicyclic nucleic acid (BNA)
  modified_base (18)..(18): bicyclic nucleic acid (BNA)
aggaagauggcauuucta

SEQ ID NO: 20831 - DNA, 17 bp, Artificial Sequence
  source: /note="Description of Artificial Sequence: Synthetic oligonucleotide"
  source: /note="Description of Combined DNA/RNA Molecule: Synthetic oligonucleotide"
  source: /note="DNA/RNA"
  modified_base (1)..(1): bicyclic nucleic acid (BNA)
  modified_base (2)..(2): bicyclic nucleic acid (BNA)
  modified_base (11)..(11): 5-methyl modified nucleotide
  modified_base (16)..(16): 5-methyl bicyclic nucleic acid
  modified_base (17)..(17): bicyclic nucleic acid (BNA)
aggaagauggcauuuct

SEQ ID NO: 20832 - DNA, 16 bp, Artificial Sequence
  source: /note="Description of Artificial Sequence: Synthetic oligonucleotide"
  source: /note="Description of Combined DNA/RNA Molecule: Synthetic oligonucleotide"
  source: /note="DNA/RNA"
  modified_base (1)..(1): bicyclic nucleic acid (BNA)
  modified_base (2)..(2): bicyclic nucleic acid (BNA)
  modified_base (11)..(11): 5-methyl modified nucleotide
  modified_base (15)..(15): bicyclic nucleic acid (BNA)
  modified_base (16)..(16): 5-methyl bicyclic nucleic acid
aggaagauggcauutc

SEQ ID NO: 20833 - DNA, 15 bp, Artificial Sequence
  source: /note="Description of Artificial Sequence: Synthetic oligonucleotide"
  source: /note="Description of Combined DNA/RNA Molecule: Synthetic oligonucleotide"
  source: /note="DNA/RNA"
  modified_base (1)..(1): bicyclic nucleic acid (BNA)
  modified_base (2)..(2): bicyclic nucleic acid (BNA)
  modified_base (11)..(11): 5-methyl modified nucleotide
  modified_base (14)..(14): bicyclic nucleic acid (BNA)
  modified_base (15)..(15): bicyclic nucleic acid (BNA)
aggaagauggcautt

SEQ ID NO: 20834 - DNA, 14 bp, Artificial Sequence
  source: /note="Description of Artificial Sequence: Synthetic oligonucleotide"
  source: /note="Description of Combined DNA/RNA Molecule: Synthetic oligonucleotide"
  source: /note="DNA/RNA"
  modified_base (1)..(1): bicyclic nucleic acid (BNA)
  modified_base (2)..(2): bicyclic nucleic acid (BNA)
  modified_base (11)..(11): 5-methyl modified nucleotide
  modified_base (13)..(13): bicyclic nucleic acid (BNA)
  modified_base (14)..(14): bicyclic nucleic acid (BNA)
aggaagauggcatt

SEQ ID NO: 20835 - DNA, 13 bp, Artificial Sequence
  source: /note="Description of Artificial Sequence: Synthetic oligonucleotide"
  source: /note="Description of Combined DNA/RNA Molecule: Synthetic oligonucleotide"
  source: /note="DNA/RNA"
  modified_base (1)..(1): bicyclic nucleic acid (BNA)
  modified_base (2)..(2): bicyclic nucleic acid (BNA)
  modified_base (11)..(11): 5-methyl modified nucleotide
  modified_base (12)..(12): bicyclic nucleic acid (BNA)
  modified_base (13)..(13): bicyclic nucleic acid (BNA)
aggaagauggcat

SEQ ID NO: 20836 - RNA, 12 nt, Artificial Sequence
  source: /note="Description of Artificial Sequence: Synthetic oligonucleotide"
  source: /note="RNA"
  modified_base (1)..(1): bicyclic nucleic acid (BNA)
  modified_base (2)..(2): bicyclic nucleic acid (BNA)
  modified_base (11)..(11): 5-methyl bicyclic nucleic acid
  modified_base (12)..(12): bicyclic nucleic acid (BNA)
aggaagauggca

SEQ ID NO: 20837 - RNA, 10 nt, Artificial Sequence
  source: /note="Description of Artificial Sequence: Synthetic oligonucleotide"
  source: /note="RNA"
  modified_base (1)..(1): bicyclic nucleic acid (BNA)
  modified_base (2)..(2): bicyclic nucleic acid (BNA)
  modified_base (9)..(9): bicyclic nucleic acid (BNA)
  modified_base (10)..(10): bicyclic nucleic acid (BNA)
aggaagaugg

SEQ ID NO: 20838 - DNA, 9 bp, Artificial Sequence
  source: /note="Description of Artificial Sequence: Synthetic oligonucleotide"
  source: /note="DNA/RNA"
  modified_base (1)..(1): bicyclic nucleic acid (BNA)
  modified_base (2)..(2): bicyclic nucleic acid (BNA)
  modified_base (8)..(8): bicyclic nucleic acid (BNA)
  modified_base (9)..(9): bicyclic nucleic acid (BNA)
aggaagatg

SEQ ID NO: 20839 - DNA, 8 bp, Artificial Sequence
  source: /note="Description of Artificial Sequence: Synthetic oligonucleotide"
  source: /note="DNA/RNA"
  modified_base (1)..(1): bicyclic nucleic acid (BNA)
  modified_base (2)..(2): bicyclic nucleic acid (BNA)
  modified_base (7)..(7): bicyclic nucleic acid (BNA)
  modified_base (8)..(8): bicyclic nucleic acid (BNA)
aggaagat

SEQ ID NO: 20840 - RNA, 18 nt, Artificial Sequence
  source: /note="Description of Artificial Sequence: Synthetic oligonucleotide"
  source: /note="RNA"
  modified_base (1)..(1): bicyclic nucleic acid (BNA)
  modified_base (2)..(2): bicyclic nucleic acid (BNA)
  modified_base (10)..(10): 5-methyl modified nucleotide
  modified_base (15)..(15): 5-methyl modified nucleotide
  modified_base (17)..(17): bicyclic nucleic acid (BNA)
  modified_base (18)..(18): bicyclic nucleic acid (BNA)
ggaagauggcauuucuag

SEQ ID NO: 20841 - DNA, 17 bp, Artificial Sequence
  source: /note="Description of Artificial Sequence: Synthetic oligonucleotide"
  source: /note="Description of Combined DNA/RNA Molecule: Synthetic oligonucleotide"
  source: /note="DNA/RNA"
  modified_base (1)..(1): bicyclic nucleic acid (BNA)
  modified_base (2)..(2): bicyclic nucleic acid (BNA)
  modified_base (10)..(10): 5-methyl modified nucleotide
  modified_base (15)..(15): 5-methyl modified nucleotide
  modified_base (16)..(16): bicyclic nucleic acid (BNA)
  modified_base (17)..(17): bicyclic nucleic acid (BNA)
ggaagauggcauuucta

SEQ ID NO: 20842 - DNA, 16 bp, Artificial Sequence
  source: /note="Description of Artificial Sequence: Synthetic oligonucleotide"
  source: /note="Description of Combined DNA/RNA Molecule: Synthetic oligonucleotide"
  source: /note="DNA/RNA"
  modified_base (1)..(1): bicyclic nucleic acid (BNA)
  modified_base (2)..(2): bicyclic nucleic acid (BNA)
  modified_base (10)..(10): 5-methyl modified nucleotide
  modified_base (15)..(15): 5-methyl bicyclic nucleic acid
  modified_base (16)..(16): bicyclic nucleic acid (BNA)
ggaagauggcauuuct

SEQ ID NO: 20843 - DNA, 15 bp, Artificial Sequence
  source: /note="Description of Artificial Sequence: Synthetic oligonucleotide"
  source: /note="Description of Combined DNA/RNA Molecule: Synthetic oligonucleotide"
  source: /note="DNA/RNA"
  modified_base (1)..(1): bicyclic nucleic acid (BNA)
  modified_base (2)..(2): bicyclic nucleic acid (BNA)
  modified_base (10)..(10): 5-methyl modified nucleotide
  modified_base (14)..(14): bicyclic nucleic acid (BNA)
  modified_base (15)..(15): 5-methyl bicyclic nucleic acid
ggaagauggcauutc

SEQ ID NO: 20844 - DNA, 14 bp, Artificial Sequence
  source: /note="Description of Artificial Sequence: Synthetic oligonucleotide"
  source: /note="Description of Combined DNA/RNA Molecule: Synthetic oligonucleotide"
  source: /note="DNA/RNA"
  modified_base (1)..(1): bicyclic nucleic acid (BNA)
  modified_base (2)..(2): bicyclic nucleic acid (BNA)
  modified_base (10)..(10): 5-methyl modified nucleotide
  modified_base (13)..(13): bicyclic nucleic acid (BNA)
  modified_base (14)..(14): bicyclic nucleic acid (BNA)
ggaagauggcautt

SEQ ID NO: 20845 - DNA, 13 bp, Artificial Sequence
  source: /note="Description of Artificial Sequence: Synthetic oligonucleotide"
  source: /note="Description of Combined DNA/RNA Molecule: Synthetic oligonucleotide"
  source: /note="DNA/RNA"
  modified_base (1)..(1): bicyclic nucleic acid (BNA)
  modified_base (2)..(2): bicyclic nucleic acid (BNA)
  modified_base (10)..(10): 5-methyl modified nucleotide
  modified_base (12)..(12): bicyclic nucleic acid (BNA)
  modified_base (13)..(13): bicyclic nucleic acid (BNA)
ggaagauggcatt

SEQ ID NO: 20846 - DNA, 12 bp, Artificial Sequence
  source: /note="Description of Artificial Sequence: Synthetic oligonucleotide"
  source: /note="Description of Combined DNA/RNA Molecule: Synthetic oligonucleotide"
  source: /note="DNA/RNA"
  modified_base (1)..(1): bicyclic nucleic acid (BNA)
  modified_base (2)..(2): bicyclic nucleic acid (BNA)
  modified_base (10)..(10): 5-methyl modified nucleotide
  modified_base (11)..(11): bicyclic nucleic acid (BNA)
  modified_base (12)..(12): bicyclic nucleic acid (BNA)
ggaagauggcat

SEQ ID NO: 20847 - RNA, 11 nt, Artificial Sequence
  source: /note="Description of Artificial Sequence: Synthetic oligonucleotide"
  source: /note="RNA"
  modified_base (1)..(1): bicyclic nucleic acid (BNA)
  modified_base (2)..(2): bicyclic nucleic acid (BNA)
  modified_base (10)..(10): 5-methyl bicyclic nucleic acid
  modified_base (11)..(11): bicyclic nucleic acid (BNA)
ggaagauggca

SEQ ID NO: 20848 - RNA, 10 nt, Artificial Sequence
  source: /note="Description of Artificial Sequence: Synthetic oligonucleotide"
  source: /note="RNA"
  modified_base (1)..(1): bicyclic nucleic acid (BNA)
  modified_base (2)..(2): bicyclic nucleic acid (BNA)
  modified_base (9)..(9): bicyclic nucleic acid (BNA)
  modified_base (10)..(10): 5-methyl bicyclic nucleic acid
ggaagauggc

SEQ ID NO: 20849 - DNA, 8 bp, Artificial Sequence
  source: /note="Description of Artificial Sequence: Synthetic oligonucleotide"
  source: /note="DNA/RNA"
  modified_base (1)..(1): bicyclic nucleic acid (BNA)
  modified_base (2)..(2): bicyclic nucleic acid (BNA)
  modified_base (7)..(7): bicyclic nucleic acid (BNA)
  modified_base (8)..(8): bicyclic nucleic acid (BNA)
ggaagatg

SEQ ID NO: 20850 - RNA, 17 nt, Artificial Sequence
  source: /note="Description of Artificial Sequence: Synthetic oligonucleotide"
  source: /note="RNA"
  modified_base (1)..(1): bicyclic nucleic acid (BNA)
  modified_base (2)..(2): bicyclic nucleic acid (BNA)
  modified_base (9)..(9): 5-methyl modified nucleotide
  modified_base (14)..(14): 5-methyl modified nucleotide
  modified_base (16)..(16): bicyclic nucleic acid (BNA)
  modified_base (17)..(17): bicyclic nucleic acid (BNA)
gaagauggcauuucuag

SEQ ID NO: 20851 - DNA, 16 bp, Artificial Sequence
  source: /note="Description of Artificial Sequence: Synthetic oligonucleotide"
  source: /note="Description of Combined DNA/RNA Molecule: Synthetic oligonucleotide"
  source: /note="DNA/RNA"
  modified_base (1)..(1): bicyclic nucleic acid (BNA)
  modified_base (2)..(2): bicyclic nucleic acid (BNA)
  modified_base (9)..(9): 5-methyl modified nucleotide
  modified_base (14)..(14): 5-methyl modified nucleotide
  modified_base (15)..(15): bicyclic nucleic acid (BNA)
  modified_base (16)..(16): bicyclic nucleic acid (BNA)
gaagauggcauuucta

SEQ ID NO: 20852 - DNA, 14 bp, Artificial Sequence
  source: /note="Description of Artificial Sequence: Synthetic oligonucleotide"
  source: /note="Description of Combined DNA/RNA Molecule: Synthetic oligonucleotide"
  source: /note="DNA/RNA"
  modified_base (1)..(1): bicyclic nucleic acid (BNA)
  modified_base (2)..(2): bicyclic nucleic acid (BNA)
  modified_base (9)..(9): 5-methyl modified nucleotide
  modified_base (13)..(13): bicyclic nucleic acid (BNA)
  modified_base (14)..(14): 5-methyl bicyclic nucleic acid
gaagauggcauutc

SEQ ID NO: 20853 - DNA, 13 bp, Artificial Sequence
  source: /note="Description of Artificial Sequence: Synthetic oligonucleotide"
  source: /note="Description of Combined DNA/RNA Molecule: Synthetic oligonucleotide"
  source: /note="DNA/RNA"
  modified_base (1)..(1): bicyclic nucleic acid (BNA)
  modified_base (2)..(2): bicyclic nucleic acid (BNA)
  modified_base (9)..(9): 5-methyl modified nucleotide
  modified_base (12)..(12): bicyclic nucleic acid (BNA)
  modified_base (13)..(13): bicyclic nucleic acid (BNA)
gaagauggcautt

SEQ ID NO: 20854 - DNA, 12 bp, Artificial Sequence
  source: /note="Description of Artificial Sequence: Synthetic oligonucleotide"
  source: /note="Description of Combined DNA/RNA Molecule: Synthetic oligonucleotide"
  source: /note="DNA/RNA"
  modified_base (1)..(1): bicyclic nucleic acid (BNA)
  modified_base (2)..(2): bicyclic nucleic acid (BNA)
  modified_base (9)..(9): 5-methyl modified nucleotide
  modified_base (11)..(11): bicyclic nucleic acid (BNA)
  modified_base (12)..(12): bicyclic nucleic acid (BNA)
gaagauggcatt

SEQ ID NO: 20855 - DNA, 11 bp, Artificial Sequence
  source: /note="Description of Artificial Sequence: Synthetic oligonucleotide"
  source: /note="Description of Combined DNA/RNA Molecule: Synthetic oligonucleotide"
  source: /note="DNA/RNA"
  modified_base (1)..(1): bicyclic nucleic acid (BNA)
  modified_base (2)..(2): bicyclic nucleic acid (BNA)
  modified_base (9)..(9): 5-methyl modified nucleotide
  modified_base (10)..(10): bicyclic nucleic acid (BNA)
  modified_base (11)..(11): bicyclic nucleic acid (BNA)
gaagauggcat

SEQ ID NO: 20856 - RNA, 10 nt, Artificial Sequence
  source: /note="Description of Artificial Sequence: Synthetic oligonucleotide"
  source: /note="RNA"
  modified_base (1)..(1): bicyclic nucleic acid (BNA)
  modified_base (2)..(2): bicyclic nucleic acid (BNA)
  modified_base (9)..(9): 5-methyl bicyclic nucleic acid
  modified_base (10)..(10): bicyclic nucleic acid (BNA)
gaagauggca

SEQ ID NO: 20857 - RNA, 9 nt, Artificial Sequence
  source: /note="Description of Artificial Sequence: Synthetic oligonucleotide"
  source: /note="RNA"
  modified_base (1)..(1): bicyclic nucleic acid (BNA)
  modified_base (2)..(2): bicyclic nucleic acid (BNA)
  modified_base (8)..(8): bicyclic nucleic acid (BNA)
  modified_base (9)..(9): 5-methyl bicyclic nucleic acid
gaagauggc

SEQ ID NO: 20858 - RNA, 8 nt, Artificial Sequence
  source: /note="Description of Artificial Sequence: Synthetic oligonucleotide"
  source: /note="RNA"
  modified_base (1)..(1): bicyclic nucleic acid (BNA)
  modified_base (2)..(2): bicyclic nucleic acid (BNA)
  modified_base (7)..(7): bicyclic nucleic acid (BNA)
  modified_base (8)..(8): bicyclic nucleic acid (BNA)
gaagaugg

SEQ ID NO: 20859 - RNA, 16 nt, Artificial Sequence
  source: /note="Description of Artificial Sequence: Synthetic oligonucleotide"
  source: /note="RNA"
  modified_base (1)..(1): bicyclic nucleic acid (BNA)
  modified_base (2)..(2): bicyclic nucleic acid (BNA)
  modified_base (8)..(8): 5-methyl modified nucleotide
  modified_base (13)..(13): 5-methyl modified nucleotide
  modified_base (15)..(15): bicyclic nucleic acid (BNA)
  modified_base (16)..(16): bicyclic nucleic acid (BNA)
aagauggcauuucuag

SEQ ID NO: 20860 - DNA, 15 bp, Artificial Sequence
  source: /note="Description of Artificial Sequence: Synthetic oligonucleotide"
  source: /note="Description of Combined DNA/RNA Molecule: Synthetic oligonucleotide"
  source: /note="DNA/RNA"
  modified_base (1)..(1): bicyclic nucleic acid (BNA)
  modified_base (2)..(2): bicyclic nucleic acid (BNA)
  modified_base (8)..(8): 5-methyl modified nucleotide
  modified_base (13)..(13): 5-methyl modified nucleotide
  modified_base (14)..(14): bicyclic nucleic acid (BNA)
  modified_base (15)..(15): bicyclic nucleic acid (BNA)
aagauggcauuucta

SEQ ID NO: 20861 - DNA, 14 bp, Artificial Sequence
  source: /note="Description of Artificial Sequence: Synthetic oligonucleotide"
  source: /note="Description of Combined DNA/RNA Molecule: Synthetic oligonucleotide"
  source: /note="DNA/RNA"
  modified_base (1)..(1): bicyclic nucleic acid (BNA)
  modified_base (2)..(2): bicyclic nucleic acid (BNA)
  modified_base (8)..(8): 5-methyl modified nucleotide
  modified_base (13)..(13): 5-methyl bicyclic nucleic acid
  modified_base (14)..(14): bicyclic nucleic acid (BNA)
aagauggcauuuct

SEQ ID NO: 20862 - DNA, 13 bp, Artificial Sequence
  source: /note="Description of Artificial Sequence: Synthetic oligonucleotide"
  source: /note="Description of Combined DNA/RNA Molecule: Synthetic oligonucleotide"
  source: /note="DNA/RNA"
  modified_base (1)..(1): bicyclic nucleic acid (BNA)
  modified_base (2)..(2): bicyclic nucleic acid (BNA)
  modified_base (8)..(8): 5-methyl modified nucleotide
  modified_base (12)..(12): bicyclic nucleic acid (BNA)
  modified_base (13)..(13): 5-methyl bicyclic nucleic acid
aagauggcauutc

SEQ ID NO: 20863 - DNA, 12 bp, Artificial Sequence
  source: /note="Description of Artificial Sequence: Synthetic oligonucleotide"
  source: /note="Description of Combined DNA/RNA Molecule: Synthetic oligonucleotide"
  source: /note="DNA/RNA"
  modified_base (1)..(1): bicyclic nucleic acid (BNA)
  modified_base (2)..(2): bicyclic nucleic acid (BNA)
  modified_base (8)..(8): 5-methyl modified nucleotide
  modified_base (11)..(11): bicyclic nucleic acid (BNA)
  modified_base (12)..(12): bicyclic nucleic acid (BNA)
aagauggcautt

SEQ ID NO: 20864 - DNA, 11 bp, Artificial Sequence
  source: /note="Description of Artificial Sequence: Synthetic oligonucleotide"
  source: /note="Description of Combined DNA/RNA Molecule: Synthetic oligonucleotide"
  source: /note="DNA/RNA"
  modified_base (1)..(1): bicyclic nucleic acid (BNA)
  modified_base (2)..(2): bicyclic nucleic acid (BNA)
  modified_base (8)..(8): 5-methyl modified nucleotide
  modified_base (10)..(10): bicyclic nucleic acid (BNA)
  modified_base (11)..(11): bicyclic nucleic acid (BNA)
aagauggcatt

SEQ ID NO: 20865 - DNA, 10 bp, Artificial Sequence
  source: /note="Description of Artificial Sequence: Synthetic oligonucleotide"
  source: /note="Description of Combined DNA/RNA Molecule: Synthetic oligonucleotide"
  source: /note="DNA/RNA"
  modified_base (1)..(1): bicyclic nucleic acid (BNA)
  modified_base (2)..(2): bicyclic nucleic acid (BNA)
  modified_base (8)..(8): 5-methyl modified nucleotide
  modified_base (9)..(9): bicyclic nucleic acid (BNA)
  modified_base (10)..(10): bicyclic nucleic acid (BNA)
aagauggcat

SEQ ID NO: 20866 - RNA, 9 nt, Artificial Sequence
  source: /note="Description of Artificial Sequence: Synthetic oligonucleotide"
  source: /note="RNA"
  modified_base (1)..(1): bicyclic nucleic acid (BNA)
  modified_base (2)..(2): bicyclic nucleic acid (BNA)
  modified_base (8)..(8): 5-methyl bicyclic nucleic acid
  modified_base (9)..(9): bicyclic nucleic acid (BNA)
aagauggca

SEQ ID NO: 20867 - RNA, 8 nt, Artificial Sequence
  source: /note="Description of Artificial Sequence: Synthetic oligonucleotide"
  source: /note="RNA"
  modified_base (1)..(1): bicyclic nucleic acid (BNA)
  modified_base (2)..(2): bicyclic nucleic acid (BNA)
  modified_base (7)..(7): bicyclic nucleic acid (BNA)
  modified_base (8)..(8): 5-methyl bicyclic nucleic acid
aagauggc

SEQ ID NO: 20868 - RNA, 15 nt, Artificial Sequence
  source: /note="Description of Artificial Sequence: Synthetic oligonucleotide"
  source: /note="RNA"
  modified_base (1)..(1): bicyclic nucleic acid (BNA)
  modified_base (2)..(2): bicyclic nucleic acid (BNA)
  modified_base (7)..(7): 5-methyl modified nucleotide
  modified_base (12)..(12): 5-methyl modified nucleotide
  modified_base (14)..(14): bicyclic nucleic acid (BNA)
  modified_base (15)..(15): bicyclic nucleic acid (BNA)
agauggcauuucuag

SEQ ID NO: 20869 - DNA, 14 bp, Artificial Sequence
  source: /note="Description of Artificial Sequence: Synthetic oligonucleotide"
  source: /note="Description of Combined DNA/RNA Molecule: Synthetic oligonucleotide"
  source: /note="DNA/RNA"
  modified_base (1)..(1): bicyclic nucleic acid (BNA)
  modified_base (2)..(2): bicyclic nucleic acid (BNA)
  modified_base (7)..(7): 5-methyl modified nucleotide
  modified_base (12)..(12): 5-methyl modified nucleotide
  modified_base (13)..(13): bicyclic nucleic acid (BNA)
  modified_base (14)..(14): bicyclic nucleic acid (BNA)
agauggcauuucta

SEQ ID NO: 20870 - DNA, 13 bp, Artificial Sequence
  source: /note="Description of Artificial Sequence: Synthetic oligonucleotide"
  source: /note="Description of Combined DNA/RNA Molecule: Synthetic oligonucleotide"
  source: /note="DNA/RNA"
  modified_base (1)..(1): bicyclic nucleic acid (BNA)
  modified_base (2)..(2): bicyclic nucleic acid (BNA)
  modified_base (7)..(7): 5-methyl modified nucleotide
  modified_base (12)..(12): 5-methyl bicyclic nucleic acid
  modified_base (13)..(13): bicyclic nucleic acid (BNA)
agauggcauuuct

SEQ ID NO: 20871 - DNA, 12 bp, Artificial Sequence
  source: /note="Description of Artificial Sequence: Synthetic oligonucleotide"
  source: /note="Description of Combined DNA/RNA Molecule: Synthetic oligonucleotide"
  source: /note="DNA/RNA"
  modified_base (1)..(1): bicyclic nucleic acid (BNA)
  modified_base (2)..(2): bicyclic nucleic acid (BNA)
  modified_base (7)..(7): 5-methyl modified nucleotide
  modified_base (11)..(11): bicyclic nucleic acid (BNA)
  modified_base (12)..(12): 5-methyl bicyclic nucleic acid
agauggcauutc

SEQ ID NO: 20872 - DNA, 11 bp, Artificial Sequence
  source: /note="Description of Artificial Sequence: Synthetic oligonucleotide"
  source: /note="Description of Combined DNA/RNA Molecule: Synthetic oligonucleotide"
  source: /note="DNA/RNA"
  modified_base (1)..(1): bicyclic nucleic acid (BNA)
  modified_base (2)..(2): bicyclic nucleic acid (BNA)
  modified_base (7)..(7): 5-methyl modified nucleotide
  modified_base (10)..(10): bicyclic nucleic acid (BNA)
  modified_base (11)..(11): bicyclic nucleic acid (BNA)
agauggcautt

SEQ ID NO: 20873 - DNA, 10 bp, Artificial Sequence
  source: /note="Description of Artificial Sequence: Synthetic oligonucleotide"
  source: /note="Description of Combined DNA/RNA Molecule: Synthetic oligonucleotide"
  source: /note="DNA/RNA"
  modified_base (1)..(1): bicyclic nucleic acid (BNA)
  modified_base (2)..(2): bicyclic nucleic acid (BNA)
  modified_base (7)..(7): 5-methyl modified nucleotide
  modified_base (9)..(9): bicyclic nucleic acid (BNA)
  modified_base (10)..(10): bicyclic nucleic acid (BNA)
agauggcatt

SEQ ID NO: 20874 - DNA, 9 bp, Artificial Sequence
  source: /note="Description of Artificial Sequence: Synthetic oligonucleotide"
  source: /note="Description of Combined DNA/RNA Molecule: Synthetic oligonucleotide"
  source: /note="DNA/RNA"
  modified_base (1)..(1): bicyclic nucleic acid (BNA)
  modified_base (2)..(2): bicyclic nucleic acid (BNA)
  modified_base (7)..(7): 5-methyl modified nucleotide
  modified_base (8)..(8): bicyclic nucleic acid (BNA)
  modified_base (9)..(9): bicyclic nucleic acid (BNA)
agauggcat

SEQ ID NO: 20875 - RNA, 8 nt, Artificial Sequence
  source: /note="Description of Artificial Sequence: Synthetic oligonucleotide"
  source: /note="RNA"
  modified_base (1)..(1): bicyclic nucleic acid (BNA)
  modified_base (2)..(2): bicyclic nucleic acid (BNA)
  modified_base (7)..(7): 5-methyl bicyclic nucleic acid
  modified_base (8)..(8): bicyclic nucleic acid (BNA)
agauggca

SEQ ID NO: 20876 - DNA, 30 bp, Artificial Sequence; identical to SEQ ID NO: 8204
  source: /note="Description of Artificial Sequence: Synthetic oligonucleotide"
  source: /note="Description of Combined DNA/RNA Molecule: Synthetic oligonucleotide"
  source: /note="DNA/RNA"
  modified_base (1)..(1): 5-methyl bicyclic nucleic acid
  modified_base (2)..(2): bicyclic nucleic acid (BNA)
  modified_base (3)..(3): 5-methyl modified nucleotide
  modified_base (4)..(4): 5-methyl modified nucleotide
  modified_base (7)..(7): 5-methyl modified nucleotide
  modified_base (10)..(10): 5-methyl modified nucleotide
  modified_base (22)..(22): 5-methyl modified nucleotide
  modified_base (27)..(27): 5-methyl modified nucleotide
  modified_base (29)..(29): bicyclic nucleic acid (BNA)
  modified_base (30)..(30): bicyclic nucleic acid (BNA)

SEQ ID NO: 20877 - DNA, 29 bp, Artificial Sequence
  source: /note="Description of Artificial Sequence: Synthetic oligonucleotide"
  source: /note="Description of Combined DNA/RNA Molecule: Synthetic oligonucleotide"
  source: /note="DNA/RNA"
  modified_base (1)..(1): 5-methyl bicyclic nucleic acid
  modified_base (2)..(2): bicyclic nucleic acid (BNA)
  modified_base (3)..(3): 5-methyl modified nucleotide
  modified_base (4)..(4): 5-methyl modified nucleotide
  modified_base (7)..(7): 5-methyl modified nucleotide
  modified_base (10)..(10): 5-methyl modified nucleotide
  modified_base (22)..(22): 5-methyl modified nucleotide
  modified_base (27)..(27): 5-methyl modified nucleotide
  modified_base (28)..(28): bicyclic nucleic acid (BNA)
  modified_base (29)..(29): bicyclic nucleic acid (BNA)
ctccaacaucaaggaagauggcauuucta

SEQ ID NO: 20878 - DNA, 28 bp, Artificial Sequence
  source: /note="Description of Artificial Sequence: Synthetic oligonucleotide"
  source: /note="Description of Combined DNA/RNA Molecule: Synthetic oligonucleotide"
  source: /note="DNA/RNA"
  modified_base (1)..(1): 5-methyl bicyclic nucleic acid
  modified_base (2)..(2): bicyclic nucleic acid (BNA)
  modified_base (3)..(3): 5-methyl modified nucleotide
  modified_base (4)..(4): 5-methyl modified nucleotide
  modified_base (7)..(7): 5-methyl modified nucleotide
  modified_base (10)..(10): 5-methyl modified nucleotide
  modified_base (22)..(22): 5-methyl modified nucleotide
  modified_base (27)..(27): 5-methyl bicyclic nucleic acid
  modified_base (28)..(28): bicyclic nucleic acid (BNA)
ctccaacaucaaggaagauggcauuuct

SEQ ID NO: 20879 - DNA, 27 bp, Artificial Sequence
  source: /note="Description of Artificial Sequence: Synthetic oligonucleotide"
  source: /note="Description of Combined DNA/RNA Molecule: Synthetic oligonucleotide"
  source: /note="DNA/RNA"
  modified_base (1)..(1): 5-methyl bicyclic nucleic acid
  modified_base (2)..(2): bicyclic nucleic acid (BNA)
  modified_base (3)..(3): 5-methyl modified nucleotide
  modified_base (4)..(4): 5-methyl modified nucleotide
  modified_base (7)..(7): 5-methyl modified nucleotide
  modified_base (10)..(10): 5-methyl modified nucleotide
  modified_base (22)..(22): 5-methyl modified nucleotide
  modified_base (26)..(26): bicyclic nucleic acid (BNA)
  modified_base (27)..(27): 5-methyl bicyclic nucleic acid
ctccaacaucaaggaagauggcauutc

SEQ ID NO: 20880 - DNA, 26 bp, Artificial Sequence
  source: /note="Description of Artificial Sequence: Synthetic oligonucleotide"
  source: /note="Description of Combined DNA/RNA Molecule: Synthetic oligonucleotide"
  source: /note="DNA/RNA"
  modified_base (1)..(1): 5-methyl bicyclic nucleic acid
  modified_base (2)..(2): bicyclic nucleic acid (BNA)
  modified_base (3)..(3): 5-methyl modified nucleotide
  modified_base (4)..(4): 5-methyl modified nucleotide
  modified_base (7)..(7): 5-methyl modified nucleotide
  modified_base (10)..(10): 5-methyl modified nucleotide
  modified_base (22)..(22): 5-methyl modified nucleotide
  modified_base (25)..(25): bicyclic nucleic acid (BNA)
  modified_base (26)..(26): bicyclic nucleic acid (BNA)
ctccaacaucaaggaagauggcautt

SEQ ID NO: 20881 - DNA, 25 bp, Artificial Sequence
  source: /note="Description of Artificial Sequence: Synthetic oligonucleotide"
  source: /note="Description of Combined DNA/RNA Molecule: Synthetic oligonucleotide"
  source: /note="DNA/RNA"
  modified_base (1)..(1): 5-methyl bicyclic nucleic acid
  modified_base (2)..(2): bicyclic nucleic acid (BNA)
  modified_base (3)..(3): 5-methyl modified nucleotide
  modified_base (4)..(4): 5-methyl modified nucleotide
  modified_base (7)..(7): 5-methyl modified nucleotide
  modified_base (10)..(10): 5-methyl modified nucleotide
  modified_base (22)..(22): 5-methyl modified nucleotide
  modified_base (24)..(24): bicyclic nucleic acid (BNA)
  modified_base (25)..(25): bicyclic nucleic acid (BNA)
ctccaacaucaaggaagauggcatt

SEQ ID NO: 20882 - DNA, 24 bp, Artificial Sequence
  source: /note="Description of Artificial Sequence: Synthetic oligonucleotide"
  source: /note="Description of Combined DNA/RNA Molecule: Synthetic oligonucleotide"
  source: /note="DNA/RNA"
  modified_base (1)..(1): 5-methyl bicyclic nucleic acid
  modified_base (2)..(2): bicyclic nucleic acid (BNA)
  modified_base (3)..(3): 5-methyl modified nucleotide
  modified_base (4)..(4): 5-methyl modified nucleotide
  modified_base (7)..(7): 5-methyl modified nucleotide
  modified_base (10)..(10): 5-methyl modified nucleotide
  modified_base (22)..(22): 5-methyl modified nucleotide
  modified_base (23)..(23): bicyclic nucleic acid (BNA)
  modified_base (24)..(24): bicyclic nucleic acid (BNA)
ctccaacaucaaggaagauggcat

SEQ ID NO: 20883 - DNA, 23 bp, Artificial Sequence
  source: /note="Description of Artificial Sequence: Synthetic oligonucleotide"
  source: /note="Description of Combined DNA/RNA Molecule: Synthetic oligonucleotide"
  source: /note="DNA/RNA"
  modified_base (1)..(1): 5-methyl bicyclic nucleic acid
  modified_base (2)..(2): bicyclic nucleic acid (BNA)
  modified_base (3)..(3): 5-methyl modified nucleotide
  modified_base (4)..(4): 5-methyl modified nucleotide
  modified_base (7)..(7): 5-methyl modified nucleotide
  modified_base (10)..(10): 5-methyl modified nucleotide
  modified_base (22)..(22): 5-methyl bicyclic nucleic acid
  modified_base (23)..(23): bicyclic nucleic acid (BNA)
ctccaacaucaaggaagauggca

SEQ ID NO: 20884 - DNA, 22 bp, Artificial Sequence
  source: /note="Description of Artificial Sequence: Synthetic oligonucleotide"
  source: /note="Description of Combined DNA/RNA Molecule: Synthetic oligonucleotide"
  source: /note="DNA/RNA"
  modified_base (1)..(1): 5-methyl bicyclic nucleic acid
  modified_base (2)..(2): bicyclic nucleic acid (BNA)
  modified_base (3)..(3): 5-methyl modified nucleotide
  modified_base (4)..(4): 5-methyl modified nucleotide
  modified_base (7)..(7): 5-methyl modified nucleotide
  modified_base (10)..(10): 5-methyl modified nucleotide
  modified_base (21)..(21): bicyclic nucleic acid (BNA)
  modified_base (22)..(22): 5-methyl bicyclic nucleic acid
ctccaacaucaaggaagauggc

SEQ ID NO: 20885 - DNA, 21 bp, Artificial Sequence
  source: /note="Description of Artificial Sequence: Synthetic oligonucleotide"
  source: /note="Description of Combined DNA/RNA Molecule: Synthetic oligonucleotide"
  source: /note="DNA/RNA"
  modified_base (1)..(1): 5-methyl bicyclic nucleic acid
  modified_base (2)..(2): bicyclic nucleic acid (BNA)
  modified_base (3)..(3): 5-methyl modified nucleotide
  modified_base (4)..(4): 5-methyl modified nucleotide
  modified_base (7)..(7): 5-methyl modified nucleotide
  modified_base (10)..(10): 5-methyl modified nucleotide
  modified_base (20)..(20): bicyclic nucleic acid (BNA)
  modified_base (21)..(21): bicyclic nucleic acid (BNA)
ctccaacaucaaggaagaugg

SEQ ID NO: 20886 - DNA, 20 bp, Artificial Sequence
  source: /note="Description of Artificial Sequence: Synthetic oligonucleotide"
  source: /note="Description of Combined DNA/RNA Molecule: Synthetic oligonucleotide"
  source: /note="DNA/RNA"
  modified_base (1)..(1): 5-methyl bicyclic nucleic acid
  modified_base (2)..(2): bicyclic nucleic acid (BNA)
  modified_base (3)..(3): 5-methyl modified nucleotide
  modified_base (4)..(4): 5-methyl modified nucleotide
  modified_base (7)..(7): 5-methyl modified nucleotide
  modified_base (10)..(10): 5-methyl modified nucleotide
  modified_base (19)..(19): bicyclic nucleic acid (BNA)
  modified_base (20)..(20): bicyclic nucleic acid (BNA)
ctccaacaucaaggaagatg

SEQ ID NO: 20887 - DNA, 19 bp, Artificial Sequence
  source: /note="Description of Artificial Sequence: Synthetic oligonucleotide"
  source: /note="Description of Combined DNA/RNA Molecule: Synthetic oligonucleotide"
  source: /note="DNA/RNA"
  modified_base (1)..(1): 5-methyl bicyclic nucleic acid
  modified_base (2)..(2): bicyclic nucleic acid (BNA)
  modified_base (3)..(3): 5-methyl modified nucleotide
  modified_base (4)..(4): 5-methyl modified nucleotide
  modified_base (7)..(7): 5-methyl modified nucleotide
  modified_base (10)..(10): 5-methyl modified nucleotide
  modified_base (18)..(18): bicyclic nucleic acid (BNA)
  modified_base (19)..(19): bicyclic nucleic acid (BNA)
ctccaacaucaaggaagat

SEQ ID NO: 20888 - DNA, 18 bp, Artificial Sequence
  source: /note="Description of Artificial Sequence: Synthetic oligonucleotide"
  source: /note="Description of Combined DNA/RNA Molecule: Synthetic oligonucleotide"
  source: /note="DNA/RNA"
  modified_base (1)..(1): 5-methyl bicyclic nucleic acid
  modified_base (2)..(2): bicyclic nucleic acid (BNA)
  modified_base (3)..(3): 5-methyl modified nucleotide
  modified_base (4)..(4): 5-methyl modified nucleotide
  modified_base (7)..(7): 5-methyl modified nucleotide
  modified_base (10)..(10): 5-methyl modified nucleotide
  modified_base (17)..(17): bicyclic nucleic acid (BNA)
  modified_base (18)..(18): bicyclic nucleic acid (BNA)
ctccaacaucaaggaaga

SEQ ID NO: 20889 - DNA, 17 bp, Artificial Sequence
  source: /note="Description of Artificial Sequence: Synthetic oligonucleotide"
  source: /note="Description of Combined DNA/RNA Molecule: Synthetic oligonucleotide"
  source: /note="DNA/RNA"
  modified_base (1)..(1): 5-methyl bicyclic nucleic acid
  modified_base (2)..(2): bicyclic nucleic acid (BNA)
  modified_base (3)..(3): 5-methyl modified nucleotide
  modified_base (4)..(4): 5-methyl modified nucleotide
  modified_base (7)..(7): 5-methyl modified nucleotide
  modified_base (10)..(10): 5-methyl modified nucleotide
  modified_base (16)..(16): bicyclic nucleic acid (BNA)
  modified_base (17)..(17): bicyclic nucleic acid (BNA)
ctccaacaucaaggaag

SEQ ID NO: 20890 - DNA, 29 bp, Artificial Sequence
  source: /note="Description of Artificial Sequence: Synthetic oligonucleotide"
  source: /note="Description of Combined DNA/RNA Molecule: Synthetic oligonucleotide"
  source: /note="DNA/RNA"
  modified_base (1)..(1): bicyclic nucleic acid (BNA)
  modified_base (2)..(2): 5-methyl bicyclic nucleic acid
  modified_base (3)..(3): 5-methyl modified nucleotide
  modified_base (6)..(6): 5-methyl modified nucleotide
  modified_base (9)..(9): 5-methyl modified nucleotide
  modified_base (21)..(21): 5-methyl modified nucleotide
  modified_base (26)..(26): 5-methyl modified nucleotide
  modified_base (28)..(28): bicyclic nucleic acid (BNA)
  modified_base (29)..(29): bicyclic nucleic acid (BNA)
tccaacaucaaggaagauggcauuucuag

SEQ ID NO: 20891 - DNA, 28 bp, Artificial Sequence
  source: /note="Description of Artificial Sequence: Synthetic oligonucleotide"
  source: /note="Description of Combined DNA/RNA Molecule: Synthetic oligonucleotide"
  source: /note="DNA/RNA"
  modified_base (1)..(1): bicyclic nucleic acid (BNA)
  modified_base (2)..(2): 5-methyl bicyclic nucleic acid
  modified_base (3)..(3): 5-methyl modified nucleotide
  modified_base (6)..(6): 5-methyl modified nucleotide
  modified_base (9)..(9): 5-methyl modified nucleotide
  modified_base (21)..(21): 5-methyl modified nucleotide
  modified_base (26)..(26): 5-methyl modified nucleotide
  modified_base (27)..(27): bicyclic nucleic acid (BNA)
  modified_base (28)..(28): bicyclic nucleic acid (BNA)
tccaacaucaaggaagauggcauuucta

SEQ ID NO: 20892 - DNA, 27 bp, Artificial Sequence
  source: /note="Description of Artificial Sequence: Synthetic oligonucleotide"
  source: /note="Description of Combined DNA/RNA Molecule: Synthetic oligonucleotide"
  source: /note="DNA/RNA"
  modified_base (1)..(1): bicyclic nucleic acid (BNA)
  modified_base (2)..(2): 5-methyl bicyclic nucleic acid
  modified_base (3)..(3): 5-methyl modified nucleotide
  modified_base (6)..(6): 5-methyl modified nucleotide
  modified_base (9)..(9): 5-methyl modified nucleotide
  modified_base (21)..(21): 5-methyl modified nucleotide
  modified_base (26)..(26): 5-methyl bicyclic nucleic acid
  modified_base (27)..(27): bicyclic nucleic acid (BNA)
tccaacaucaaggaagauggcauuuct

SEQ ID NO: 20893 - DNA, 26 bp, Artificial Sequence
  source: /note="Description of Artificial Sequence: Synthetic oligonucleotide"
  source: /note="Description of Combined DNA/RNA Molecule: Synthetic oligonucleotide"
  source: /note="DNA/RNA"
  modified_base (1)..(1): bicyclic nucleic acid (BNA)
  modified_base (2)..(2): 5-methyl bicyclic nucleic acid
  modified_base (3)..(3): 5-methyl modified nucleotide
  modified_base (6)..(6): 5-methyl modified nucleotide
  modified_base (9)..(9): 5-methyl modified nucleotide
  modified_base (21)..(21): 5-methyl modified nucleotide
  modified_base (25)..(25): bicyclic nucleic acid (BNA)
  modified_base (26)..(26): 5-methyl bicyclic nucleic acid
tccaacaucaaggaagauggcauutc

SEQ ID NO: 20894 - DNA, 25 bp, Artificial Sequence
  source: /note="Description of Artificial Sequence: Synthetic oligonucleotide"
  source: /note="Description of Combined DNA/RNA Molecule: Synthetic oligonucleotide"
  source: /note="DNA/RNA"
  modified_base (1)..(1): bicyclic nucleic acid (BNA)
  modified_base (2)..(2): 5-methyl bicyclic nucleic acid
  modified_base (3)..(3): 5-methyl modified nucleotide
  modified_base (6)..(6): 5-methyl modified nucleotide
  modified_base (9)..(9): 5-methyl modified nucleotide
  modified_base (21)..(21): 5-methyl modified nucleotide
  modified_base (24)..(24): bicyclic nucleic acid (BNA)
  modified_base (25)..(25): bicyclic nucleic acid (BNA)
tccaacaucaaggaagauggcautt

SEQ ID NO: 20895 - DNA, 24 bp, Artificial Sequence
  source: /note="Description of Artificial Sequence: Synthetic oligonucleotide"
  source: /note="Description of Combined DNA/RNA Molecule: Synthetic oligonucleotide"
  source: /note="DNA/RNA"
  modified_base (1)..(1): bicyclic nucleic acid (BNA)
  modified_base (2)..(2): 5-methyl bicyclic nucleic acid
  modified_base (3)..(3): 5-methyl modified nucleotide
  modified_base (6)..(6): 5-methyl modified nucleotide
  modified_base (9)..(9): 5-methyl modified nucleotide
  modified_base (21)..(21): 5-methyl modified nucleotide
  modified_base (23)..(23): bicyclic nucleic acid (BNA)
  modified_base (24)..(24): bicyclic nucleic acid (BNA)
tccaacaucaaggaagauggcatt

SEQ ID NO: 20896 - DNA, 23 bp, Artificial Sequence
  source: /note="Description of Artificial Sequence: Synthetic oligonucleotide"
  source: /note="Description of Combined DNA/RNA Molecule: Synthetic oligonucleotide"
  source: /note="DNA/RNA"
  modified_base (1)..(1): bicyclic nucleic acid (BNA)
  modified_base (2)..(2): 5-methyl bicyclic nucleic acid
  modified_base (3)..(3): 5-methyl modified nucleotide
  modified_base (6)..(6): 5-methyl modified nucleotide
  modified_base (9)..(9): 5-methyl modified nucleotide
  modified_base (21)..(21): 5-methyl modified nucleotide
  modified_base (22)..(22): bicyclic nucleic acid (BNA)
  modified_base (23)..(23): bicyclic nucleic acid (BNA)
tccaacaucaaggaagauggcat

SEQ ID NO: 20897 - DNA, 22 bp, Artificial Sequence
  source: /note="Description of Artificial Sequence: Synthetic oligonucleotide"
  source: /note="Description of Combined DNA/RNA Molecule: Synthetic oligonucleotide"
  source: /note="DNA/RNA"
  modified_base (1)..(1): bicyclic nucleic acid (BNA)
  modified_base (2)..(2): 5-methyl bicyclic nucleic acid
  modified_base (3)..(3): 5-methyl modified nucleotide
  modified_base (6)..(6): 5-methyl modified nucleotide
  modified_base (9)..(9): 5-methyl modified nucleotide
  modified_base (21)..(21): 5-methyl bicyclic nucleic acid
  modified_base (22)..(22): bicyclic nucleic acid (BNA)
tccaacaucaaggaagauggca

SEQ ID NO: 20898 - DNA, 21 bp, Artificial Sequence
  source: /note="Description of Artificial Sequence: Synthetic oligonucleotide"
  source: /note="Description of Combined DNA/RNA Molecule: Synthetic oligonucleotide"
  source: /note="DNA/RNA"
  modified_base (1)..(1): bicyclic nucleic acid (BNA)
  modified_base (2)..(2): 5-methyl bicyclic nucleic acid
  modified_base (3)..(3): 5-methyl modified nucleotide
  modified_base (6)..(6): 5-methyl modified nucleotide
  modified_base (9)..(9): 5-methyl modified nucleotide
  modified_base (20)..(20): bicyclic nucleic acid (BNA)
  modified_base (21)..(21): 5-methyl bicyclic nucleic acid
tccaacaucaaggaagauggc

SEQ ID NO: 20899 - DNA, 20 bp, Artificial Sequence
  source: /note="Description of Artificial Sequence: Synthetic oligonucleotide"
  source: /note="Description of Combined DNA/RNA Molecule: Synthetic oligonucleotide"
  source: /note="DNA/RNA"
  modified_base (1)..(1): bicyclic nucleic acid (BNA)
  modified_base (2)..(2): 5-methyl bicyclic nucleic acid
  modified_base (3)..(3): 5-methyl modified nucleotide
  modified_base (6)..(6): 5-methyl modified nucleotide
  modified_base (9)..(9): 5-methyl modified nucleotide
  modified_base (19)..(19): bicyclic nucleic acid (BNA)
  modified_base (20)..(20): bicyclic nucleic acid (BNA)
tccaacaucaaggaagaugg

SEQ ID NO: 20900 - DNA, 19 bp, Artificial Sequence
  source: /note="Description of Artificial Sequence: Synthetic oligonucleotide"
  source: /note="Description of Combined DNA/RNA Molecule: Synthetic oligonucleotide"
  source: /note="DNA/RNA"
  modified_base (1)..(1): bicyclic nucleic acid (BNA)
  modified_base (2)..(2): 5-methyl bicyclic nucleic acid
  modified_base (3)..(3): 5-methyl modified nucleotide
  modified_base (6)..(6): 5-methyl modified nucleotide
  modified_base (9)..(9): 5-methyl modified nucleotide
  modified_base (18)..(18): bicyclic nucleic acid (BNA)
  modified_base (19)..(19): bicyclic nucleic acid (BNA)
tccaacaucaaggaagatg

SEQ ID NO: 20901 - DNA, 18 bp, Artificial Sequence
  source: /note="Description of Artificial Sequence: Synthetic oligonucleotide"
  source: /note="Description of Combined DNA/RNA Molecule: Synthetic oligonucleotide"
  source: /note="DNA/RNA"
  modified_base (1)..(1): bicyclic nucleic acid (BNA)
  modified_base (2)..(2): 5-methyl bicyclic nucleic acid
  modified_base (3)..(3): 5-methyl modified nucleotide
  modified_base (6)..(6): 5-methyl modified nucleotide
  modified_base (9)..(9): 5-methyl modified nucleotide
  modified_base (17)..(17): bicyclic nucleic acid (BNA)
  modified_base (18)..(18): bicyclic nucleic acid (BNA)
tccaacaucaaggaagat

SEQ ID NO: 20902 - DNA, 17 bp, Artificial Sequence
  source: /note="Description of Artificial Sequence: Synthetic oligonucleotide"
  source: /note="Description of Combined DNA/RNA Molecule: Synthetic oligonucleotide"
  source: /note="DNA/RNA"
  modified_base (1)..(1): bicyclic nucleic acid (BNA)
  modified_base (2)..(2): 5-methyl bicyclic nucleic acid
  modified_base (3)..(3): 5-methyl modified nucleotide
  modified_base (6)..(6): 5-methyl modified nucleotide
  modified_base (9)..(9): 5-methyl modified nucleotide
  modified_base (16)..(16): bicyclic nucleic acid (BNA)
  modified_base (17)..(17): bicyclic nucleic acid (BNA)
tccaacaucaaggaaga

SEQ ID NO: 20903 - DNA, 16 bp, Artificial Sequence
  source: /note="Description of Artificial Sequence: Synthetic oligonucleotide"
  source: /note="Description of Combined DNA/RNA Molecule: Synthetic oligonucleotide"
  source: /note="DNA/RNA"
  modified_base (1)..(1): bicyclic nucleic acid (BNA)
  modified_base (2)..(2): 5-methyl bicyclic nucleic acid
  modified_base (3)..(3): 5-methyl modified nucleotide
  modified_base (6)..(6): 5-methyl modified nucleotide
  modified_base (9)..(9): 5-methyl modified nucleotide
  modified_base (15)..(15): bicyclic nucleic acid (BNA)
  modified_base (16)..(16): bicyclic nucleic acid (BNA)
tccaacaucaaggaag

SEQ ID NO: 20904 - RNA, 28 nt, Artificial Sequence
  source: /note="Description of Artificial Sequence: Synthetic oligonucleotide"
  source: /note="RNA"
  modified_base (1)..(1): 5-methyl bicyclic nucleic acid
  modified_base (2)..(2): 5-methyl bicyclic nucleic acid
  modified_base (5)..(5): 5-methyl modified nucleotide
  modified_base (8)..(8): 5-methyl modified nucleotide
  modified_base (20)..(20): 5-methyl modified nucleotide
  modified_base (25)..(25): 5-methyl modified nucleotide
  modified_base (27)..(27): bicyclic nucleic acid (BNA)
  modified_base (28)..(28): bicyclic nucleic acid (BNA)
ccaacaucaaggaagauggcauuucuag

SEQ ID NO: 20905 - DNA, 27 bp, Artificial Sequence
  source: /note="Description of Artificial Sequence: Synthetic oligonucleotide"
  source: /note="Description of Combined DNA/RNA Molecule: Synthetic oligonucleotide"
  source: /note="DNA/RNA"
  modified_base (1)..(1): 5-methyl bicyclic nucleic acid
  modified_base (2)..(2): 5-methyl bicyclic nucleic acid
  modified_base (5)..(5): 5-methyl modified nucleotide
  modified_base (8)..(8): 5-methyl modified nucleotide
  modified_base (20)..(20): 5-methyl modified nucleotide
  modified_base (25)..(25): 5-methyl modified nucleotide
  modified_base (26)..(26): bicyclic nucleic acid (BNA)
  modified_base (27)..(27): bicyclic nucleic acid (BNA)
ccaacaucaaggaagauggcauuucta

SEQ ID NO: 20906 - DNA, 26 bp, Artificial Sequence
  source: /note="Description of Artificial Sequence: Synthetic oligonucleotide"
  source: /note="Description of Combined DNA/RNA Molecule: Synthetic oligonucleotide"
  source: /note="DNA/RNA"
  modified_base (1)..(1): 5-methyl bicyclic nucleic acid
  modified_base (2)..(2): 5-methyl bicyclic nucleic acid
  modified_base (5)..(5): 5-methyl modified nucleotide
  modified_base (8)..(8): 5-methyl modified nucleotide
  modified_base (20)..(20): 5-methyl modified nucleotide
  modified_base (25)..(25): 5-methyl bicyclic nucleic acid
  modified_base (26)..(26): bicyclic nucleic acid (BNA)
ccaacaucaaggaagauggcauuuct

SEQ ID NO: 20907 - DNA, 25 bp, Artificial Sequence
  source: /note="Description of Artificial Sequence: Synthetic oligonucleotide"
  source: /note="Description of Combined DNA/RNA Molecule: Synthetic oligonucleotide"
  source: /note="DNA/RNA"
  modified_base (1)..(1): 5-methyl bicyclic nucleic acid
  modified_base (2)..(2): 5-methyl bicyclic nucleic acid
  modified_base (5)..(5): 5-methyl modified nucleotide
  modified_base (8)..(8): 5-methyl modified nucleotide
  modified_base (20)..(20): 5-methyl modified nucleotide
  modified_base (24)..(24): bicyclic nucleic acid (BNA)
  modified_base (25)..(25): 5-methyl bicyclic nucleic acid
ccaacaucaaggaagauggcauutc

SEQ ID NO: 20908 - DNA, 24 bp, Artificial Sequence
  source: /note="Description of Artificial Sequence: Synthetic oligonucleotide"
  source: /note="Description of Combined DNA/RNA Molecule: Synthetic oligonucleotide"
  source: /note="DNA/RNA"
  modified_base (1)..(1): 5-methyl bicyclic nucleic acid
  modified_base (2)..(2): 5-methyl bicyclic nucleic acid
  modified_base (5)..(5): 5-methyl modified nucleotide
  modified_base (8)..(8): 5-methyl modified nucleotide
  modified_base (20)..(20): 5-methyl modified nucleotide
  modified_base (23)..(23): bicyclic nucleic acid (BNA)
  modified_base (24)..(24): bicyclic nucleic acid (BNA)
ccaacaucaaggaagauggcautt

SEQ ID NO: 20909 - DNA, 23 bp, Artificial Sequence
  source: /note="Description of Artificial Sequence: Synthetic oligonucleotide"
  source: /note="Description of Combined DNA/RNA Molecule: Synthetic oligonucleotide"
  source: /note="DNA/RNA"
  modified_base (1)..(1): 5-methyl bicyclic nucleic acid
  modified_base (2)..(2): 5-methyl bicyclic nucleic acid
  modified_base (5)..(5): 5-methyl modified nucleotide
  modified_base (8)..(8): 5-methyl modified nucleotide
  modified_base (20)..(20): 5-methyl modified nucleotide
  modified_base (22)..(22): bicyclic nucleic acid (BNA)
  modified_base (23)..(23): bicyclic nucleic acid (BNA)
ccaacaucaaggaagauggcatt

SEQ ID NO: 20910 - DNA, 22 bp, Artificial Sequence
  source: /note="Description of Artificial Sequence: Synthetic oligonucleotide"
  source: /note="Description of Combined DNA/RNA Molecule: Synthetic oligonucleotide"
  source: /note="DNA/RNA"
  modified_base (1)..(1): 5-methyl bicyclic nucleic acid
  modified_base (2)..(2): 5-methyl bicyclic nucleic acid
  modified_base (5)..(5): 5-methyl modified nucleotide
  modified_base (8)..(8): 5-methyl modified nucleotide
  modified_base (20)..(20): 5-methyl modified nucleotide
  modified_base (21)..(21): bicyclic nucleic acid (BNA)
  modified_base (22)..(22): bicyclic nucleic acid (BNA)
ccaacaucaaggaagauggcat

SEQ ID NO: 20911 - RNA, 21 nt, Artificial Sequence
  source: /note="Description of Artificial Sequence: Synthetic oligonucleotide"
  source: /note="RNA"
  modified_base (1)..(1): 5-methyl bicyclic nucleic acid
  modified_base (2)..(2): 5-methyl bicyclic nucleic acid
  modified_base (5)..(5): 5-methyl modified nucleotide
  modified_base (8)..(8): 5-methyl modified nucleotide
  modified_base (20)..(20): 5-methyl bicyclic nucleic acid
  modified_base (21)..(21): bicyclic nucleic acid (BNA)
ccaacaucaaggaagauggca

SEQ ID NO: 20912 - RNA, 20 nt, Artificial Sequence
  source: /note="Description of Artificial Sequence: Synthetic oligonucleotide"
  source: /note="RNA"
  modified_base (1)..(1): 5-methyl bicyclic nucleic acid
  modified_base (2)..(2): 5-methyl bicyclic nucleic acid
  modified_base (5)..(5): 5-methyl modified nucleotide
  modified_base (8)..(8): 5-methyl modified nucleotide
  modified_base (19)..(19): bicyclic nucleic acid (BNA)
  modified_base (20)..(20): 5-methyl bicyclic nucleic acid
ccaacaucaaggaagauggc

SEQ ID NO: 20913 - RNA, 19 nt, Artificial Sequence
  source: /note="Description of Artificial Sequence: Synthetic oligonucleotide"
  source: /note="RNA"
  modified_base (1)..(1): 5-methyl bicyclic nucleic acid
  modified_base (2)..(2): 5-methyl bicyclic nucleic acid
  modified_base (5)..(5): 5-methyl modified nucleotide
  modified_base (8)..(8): 5-methyl modified nucleotide
  modified_base (18)..(18): bicyclic nucleic acid (BNA)
  modified_base (19)..(19): bicyclic nucleic acid (BNA)
ccaacaucaaggaagaugg

SEQ ID NO: 20914 - DNA, 18 bp, Artificial Sequence
  source: /note="Description of Artificial Sequence: Synthetic oligonucleotide"
  source: /note="Description of Combined DNA/RNA Molecule: Synthetic oligonucleotide"
  source: /note="DNA/RNA"
  modified_base (1)..(1): 5-methyl bicyclic nucleic acid
  modified_base (2)..(2): 5-methyl bicyclic nucleic acid
  modified_base (5)..(5): 5-methyl modified nucleotide
  modified_base (8)..(8): 5-methyl modified nucleotide
  modified_base (17)..(17): bicyclic nucleic acid (BNA)
  modified_base (18)..(18): bicyclic nucleic acid (BNA)
ccaacaucaaggaagatg

SEQ ID NO: 20915 - DNA, 17 bp, Artificial Sequence
  source: /note="Description of Artificial Sequence: Synthetic oligonucleotide"
  source: /note="Description of Combined DNA/RNA Molecule: Synthetic oligonucleotide"
  source: /note="DNA/RNA"
  modified_base (1)..(1): 5-methyl bicyclic nucleic acid
  modified_base (2)..(2): 5-methyl bicyclic nucleic acid
  modified_base (5)..(5): 5-methyl modified nucleotide
  modified_base (8)..(8): 5-methyl modified nucleotide
  modified_base (16)..(16): bicyclic nucleic acid (BNA)
  modified_base (17)..(17): bicyclic nucleic acid (BNA)
ccaacaucaaggaagat

SEQ ID NO: 20916 - RNA, 16 nt, Artificial Sequence
  source: /note="Description of Artificial Sequence: Synthetic oligonucleotide"
  source: /note="RNA"
  modified_base (1)..(1): 5-methyl bicyclic nucleic acid
  modified_base (2)..(2): 5-methyl bicyclic nucleic acid
  modified_base (5)..(5): 5-methyl modified nucleotide
  modified_base (8)..(8): 5-methyl modified nucleotide
  modified_base (15)..(15): bicyclic nucleic acid (BNA)
  modified_base (16)..(16): bicyclic nucleic acid (BNA)
ccaacaucaaggaaga

SEQ ID NO: 20917 - RNA, 15 nt, Artificial Sequence
  source: /note="Description of Artificial Sequence: Synthetic oligonucleotide"
  source: /note="RNA"
  modified_base (1)..(1): 5-methyl bicyclic nucleic acid
  modified_base (2)..(2): 5-methyl bicyclic nucleic acid
  modified_base (5)..(5): 5-methyl modified nucleotide
  modified_base (8)..(8): 5-methyl modified nucleotide
  modified_base (14)..(14): bicyclic nucleic acid (BNA)
  modified_base (15)..(15): bicyclic nucleic acid (BNA)
ccaacaucaaggaag

SEQ ID NO: 20918 - RNA, 27 nt, Artificial Sequence
  source: /note="Description of Artificial Sequence: Synthetic oligonucleotide"
  source: /note="RNA"
  modified_base (1)..(1): 5-methyl bicyclic nucleic acid
  modified_base (2)..(2): bicyclic nucleic acid (BNA)
  modified_base (4)..(4): 5-methyl modified nucleotide
  modified_base (7)..(7): 5-methyl modified nucleotide
  modified_base (19)..(19): 5-methyl modified nucleotide
  modified_base (24)..(24): 5-methyl modified nucleotide
  modified_base (26)..(26): bicyclic nucleic acid (BNA)
  modified_base (27)..(27): bicyclic nucleic acid (BNA)
caacaucaaggaagauggcauuucuag

SEQ ID NO: 20919 - DNA, 26 bp, Artificial Sequence
  source: /note="Description of Artificial Sequence: Synthetic oligonucleotide"
  source: /note="Description of Combined DNA/RNA Molecule: Synthetic oligonucleotide"
  source: /note="DNA/RNA"
  modified_base (1)..(1): 5-methyl bicyclic nucleic acid
  modified_base (2)..(2): bicyclic nucleic acid (BNA)
  modified_base (4)..(4): 5-methyl modified nucleotide
  modified_base (7)..(7): 5-methyl modified nucleotide
  modified_base (19)..(19): 5-methyl modified nucleotide
  modified_base (24)..(24): 5-methyl modified nucleotide
  modified_base (25)..(25): bicyclic nucleic acid (BNA)
  modified_base (26)..(26): bicyclic nucleic acid (BNA)
caacaucaaggaagauggcauuucta

SEQ ID NO: 20920 - DNA, 25 bp, Artificial Sequence
  source: /note="Description of Artificial Sequence: Synthetic oligonucleotide"
  source: /note="Description of Combined DNA/RNA Molecule: Synthetic oligonucleotide"
  source: /note="DNA/RNA"
  modified_base (1)..(1): 5-methyl bicyclic nucleic acid
  modified_base (2)..(2): bicyclic nucleic acid (BNA)
  modified_base (4)..(4): 5-methyl modified nucleotide
  modified_base (7)..(7): 5-methyl modified nucleotide
  modified_base (19)..(19): 5-methyl modified nucleotide
  modified_base (24)..(24): 5-methyl bicyclic nucleic acid
  modified_base (25)..(25): bicyclic nucleic acid (BNA)
caacaucaaggaagauggcauuuct

SEQ ID NO: 20921 - DNA, 24 bp, Artificial Sequence
  source: /note="Description of Artificial Sequence: Synthetic oligonucleotide"
  source: /note="Description of Combined DNA/RNA Molecule: Synthetic oligonucleotide"
  source: /note="DNA/RNA"
  modified_base (1)..(1): 5-methyl bicyclic nucleic acid
  modified_base (2)..(2): bicyclic nucleic acid (BNA)
  modified_base (4)..(4): 5-methyl modified nucleotide
  modified_base (7)..(7): 5-methyl modified nucleotide
  modified_base (19)..(19): 5-methyl modified nucleotide
  modified_base (23)..(23): bicyclic nucleic acid (BNA)
  modified_base (24)..(24): 5-methyl bicyclic nucleic acid
caacaucaaggaagauggcauutc

SEQ ID NO: 20922 - DNA, 23 bp, Artificial Sequence
  source: /note="Description of Artificial Sequence: Synthetic oligonucleotide"
  source: /note="Description of Combined DNA/RNA Molecule: Synthetic oligonucleotide"
  source: /note="DNA/RNA"
  modified_base (1)..(1): 5-methyl bicyclic nucleic acid
  modified_base (2)..(2): bicyclic nucleic acid (BNA)
  modified_base (4)..(4): 5-methyl modified nucleotide
  modified_base (7)..(7): 5-methyl modified nucleotide
  modified_base (19)..(19): 5-methyl modified nucleotide
  modified_base (22)..(22): bicyclic nucleic acid (BNA)
  modified_base (23)..(23): bicyclic nucleic acid (BNA)
caacaucaaggaagauggcautt

SEQ ID NO: 20923 - DNA, 22 bp, Artificial Sequence
  source: /note="Description of Artificial Sequence: Synthetic oligonucleotide"
  source: /note="Description of Combined DNA/RNA Molecule: Synthetic oligonucleotide"
  source: /note="DNA/RNA"
  modified_base (1)..(1): 5-methyl bicyclic nucleic acid
  modified_base (2)..(2): bicyclic nucleic acid (BNA)
  modified_base (4)..(4): 5-methyl modified nucleotide
  modified_base (7)..(7): 5-methyl modified nucleotide
  modified_base (19)..(19): 5-methyl modified nucleotide
  modified_base (21)..(21): bicyclic nucleic acid (BNA)
  modified_base (22)..(22): bicyclic nucleic acid (BNA)
caacaucaaggaagauggcatt

SEQ ID NO: 20924 - DNA, 21 bp, Artificial Sequence
  source: /note="Description of Artificial Sequence: Synthetic oligonucleotide"
  source: /note="Description of Combined DNA/RNA Molecule: Synthetic oligonucleotide"
  source: /note="DNA/RNA"
  modified_base (1)..(1): 5-methyl bicyclic nucleic acid
  modified_base (2)..(2): bicyclic nucleic acid (BNA)
  modified_base (4)..(4): 5-methyl modified nucleotide
  modified_base (7)..(7): 5-methyl modified nucleotide
  modified_base (19)..(19): 5-methyl modified nucleotide
  modified_base (20)..(20): bicyclic nucleic acid (BNA)
  modified_base (21)..(21): bicyclic nucleic acid (BNA)
caacaucaaggaagauggcat

SEQ ID NO: 20925 - RNA, 20 nt, Artificial Sequence
  source: /note="Description of Artificial Sequence: Synthetic oligonucleotide"
  source: /note="RNA"
  modified_base (1)..(1): 5-methyl bicyclic nucleic acid
  modified_base (2)..(2): bicyclic nucleic acid (BNA)
  modified_base (4)..(4): 5-methyl modified nucleotide
  modified_base (7)..(7): 5-methyl modified nucleotide
  modified_base (19)..(19): 5-methyl bicyclic nucleic acid
  modified_base (20)..(20): bicyclic nucleic acid (BNA)
caacaucaaggaagauggca

SEQ ID NO: 20926 - RNA, 19 nt, Artificial Sequence
  source: /note="Description of Artificial Sequence: Synthetic oligonucleotide"
  source: /note="RNA"
  modified_base (1)..(1): 5-methyl bicyclic nucleic acid
  modified_base (2)..(2): bicyclic nucleic acid (BNA)
  modified_base (4)..(4): 5-methyl modified nucleotide
  modified_base (7)..(7): 5-methyl modified nucleotide
  modified_base (18)..(18): bicyclic nucleic acid (BNA)
  modified_base (19)..(19): 5-methyl bicyclic nucleic acid
caacaucaaggaagauggc

SEQ ID NO: 20927 - RNA, 18 nt, Artificial Sequence
  source: /note="Description of Artificial Sequence: Synthetic oligonucleotide"
  source: /note="RNA"
  modified_base (1)..(1): 5-methyl bicyclic nucleic acid
  modified_base (2)..(2): bicyclic nucleic acid (BNA)
  modified_base (4)..(4): 5-methyl modified nucleotide
  modified_base (7)..(7): 5-methyl modified nucleotide
  modified_base (17)..(17): bicyclic nucleic acid (BNA)
  modified_base (18)..(18): bicyclic nucleic acid (BNA)
caacaucaaggaagaugg

SEQ ID NO: 20928 - DNA, 17 bp, Artificial Sequence
  source: /note="Description of Artificial Sequence: Synthetic oligonucleotide"
  source: /note="Description of Combined DNA/RNA Molecule: Synthetic oligonucleotide"
  source: /note="DNA/RNA"
  modified_base (1)..(1): 5-methyl bicyclic nucleic acid
  modified_base (2)..(2): bicyclic nucleic acid (BNA)
  modified_base (4)..(4): 5-methyl modified nucleotide
  modified_base (7)..(7): 5-methyl modified nucleotide
  modified_base (16)..(16): bicyclic nucleic acid (BNA)
  modified_base (17)..(17): bicyclic nucleic acid (BNA)
caacaucaaggaagatg

SEQ ID NO: 20929 - DNA, 16 bp, Artificial Sequence
  source: /note="Description of Artificial Sequence: Synthetic oligonucleotide"
  source: /note="Description of Combined DNA/RNA Molecule: Synthetic oligonucleotide"
  source: /note="DNA/RNA"
  modified_base (1)..(1): 5-methyl bicyclic nucleic acid
  modified_base (2)..(2): bicyclic nucleic acid (BNA)
  modified_base (4)..(4): 5-methyl modified nucleotide
  modified_base (7)..(7): 5-methyl modified nucleotide
  modified_base (15)..(15): bicyclic nucleic acid (BNA)
  modified_base (16)..(16): bicyclic nucleic acid (BNA)
caacaucaaggaagat

SEQ ID NO: 20930 - RNA, 15 nt, Artificial Sequence
  source: /note="Description of Artificial Sequence: Synthetic oligonucleotide"
  source: /note="RNA"
  modified_base (1)..(1): 5-methyl bicyclic nucleic acid
  modified_base (2)..(2): bicyclic nucleic acid (BNA)
  modified_base (4)..(4): 5-methyl modified nucleotide
  modified_base (7)..(7): 5-methyl modified nucleotide
  modified_base (14)..(14): bicyclic nucleic acid (BNA)
  modified_base (15)..(15): bicyclic nucleic acid (BNA)
caacaucaaggaaga

SEQ ID NO: 20931 - RNA, 14 nt, Artificial Sequence
  source: /note="Description of Artificial Sequence: Synthetic oligonucleotide"
  source: /note="RNA"
  modified_base (1)..(1): 5-methyl bicyclic nucleic acid
  modified_base (2)..(2): bicyclic nucleic acid (BNA)
  modified_base (4)..(4): 5-methyl modified nucleotide
  modified_base (7)..(7): 5-methyl modified nucleotide
  modified_base (13)..(13): bicyclic nucleic acid (BNA)
  modified_base (14)..(14): bicyclic nucleic acid (BNA)
caacaucaaggaag

SEQ ID NO: 20932 - RNA, 26 nt, Artificial Sequence
  source: /note="Description of Artificial Sequence: Synthetic oligonucleotide"
  source: /note="RNA"
  modified_base (1)..(1): bicyclic nucleic acid (BNA)
  modified_base (2)..(2): bicyclic nucleic acid (BNA)
  modified_base (3)..(3): 5-methyl modified nucleotide
  modified_base (6)..(6): 5-methyl modified nucleotide
  modified_base (18)..(18): 5-methyl modified nucleotide
  modified_base (23)..(23): 5-methyl modified nucleotide
  modified_base (25)..(25): bicyclic nucleic acid (BNA)
  modified_base (26)..(26): bicyclic nucleic acid (BNA)
aacaucaaggaagauggcauuucuag

SEQ ID NO: 20933 - DNA, 25 bp, Artificial Sequence
  source: /note="Description of Artificial Sequence: Synthetic oligonucleotide"
  source: /note="Description of Combined DNA/RNA Molecule: Synthetic oligonucleotide"
  source: /note="DNA/RNA"
  modified_base (1)..(1): bicyclic nucleic acid (BNA)
  modified_base (2)..(2): bicyclic nucleic acid (BNA)
  modified_base (3)..(3): 5-methyl modified nucleotide
  modified_base (6)..(6): 5-methyl modified nucleotide
  modified_base (18)..(18): 5-methyl modified nucleotide
  modified_base (23)..(23): 5-methyl modified nucleotide
  modified_base (24)..(24): bicyclic nucleic acid (BNA)
  modified_base (25)..(25): bicyclic nucleic acid (BNA)
aacaucaaggaagauggcauuucta

SEQ ID NO: 20934 - DNA, 24 bp, Artificial Sequence
  source: /note="Description of Artificial Sequence: Synthetic oligonucleotide"
  source: /note="Description of Combined DNA/RNA Molecule: Synthetic oligonucleotide"
  source: /note="DNA/RNA"
  modified_base (1)..(1): bicyclic nucleic acid (BNA)
  modified_base (2)..(2): bicyclic nucleic acid (BNA)
  modified_base (3)..(3): 5-methyl modified nucleotide
  modified_base (6)..(6): 5-methyl modified nucleotide
  modified_base (18)..(18): 5-methyl modified nucleotide
  modified_base (23)..(23): 5-methyl bicyclic nucleic acid
  modified_base (24)..(24): bicyclic nucleic acid (BNA)
aacaucaaggaagauggcauuuct

SEQ ID NO: 20935 - DNA, 23 bp, Artificial Sequence
  source: /note="Description of Artificial Sequence: Synthetic oligonucleotide"
  source: /note="Description of Combined DNA/RNA Molecule: Synthetic oligonucleotide"
  source: /note="DNA/RNA"
  modified_base (1)..(1): bicyclic nucleic acid (BNA)
  modified_base (2)..(2): bicyclic nucleic acid (BNA)
  modified_base (3)..(3): 5-methyl modified nucleotide
  modified_base (6)..(6): 5-methyl modified nucleotide
  modified_base (18)..(18): 5-methyl modified nucleotide
  modified_base (22)..(22): bicyclic nucleic acid (BNA)
  modified_base (23)..(23): 5-methyl bicyclic nucleic acid
aacaucaaggaagauggcauutc

SEQ ID NO: 20936 - DNA, 22 bp, Artificial Sequence
  source: /note="Description of Artificial Sequence: Synthetic oligonucleotide"
  source: /note="Description of Combined DNA/RNA Molecule: Synthetic oligonucleotide"
  source: /note="DNA/RNA"
  modified_base (1)..(1): bicyclic nucleic acid (BNA)
  modified_base (2)..(2): bicyclic nucleic acid (BNA)
  modified_base (3)..(3): 5-methyl modified nucleotide
  modified_base (6)..(6): 5-methyl modified nucleotide
  modified_base (18)..(18): 5-methyl modified nucleotide
  modified_base (21)..(21): bicyclic nucleic acid (BNA)
  modified_base (22)..(22): bicyclic nucleic acid (BNA)
aacaucaaggaagauggcautt

SEQ ID NO: 20937 - DNA, 21 bp, Artificial Sequence
  source: /note="Description of Artificial Sequence: Synthetic oligonucleotide"
  source: /note="Description of Combined DNA/RNA Molecule: Synthetic oligonucleotide"
  source: /note="DNA/RNA"
  modified_base (1)..(1): bicyclic nucleic acid (BNA)
  modified_base (2)..(2): bicyclic nucleic acid (BNA)
  modified_base (3)..(3): 5-methyl modified nucleotide
  modified_base (6)..(6): 5-methyl modified nucleotide
  modified_base (18)..(18): 5-methyl modified nucleotide
  modified_base (20)..(20): bicyclic nucleic acid (BNA)
  modified_base (21)..(21): bicyclic nucleic acid (BNA)
aacaucaaggaagauggcatt

SEQ ID NO: 20938 - DNA, 20 bp, Artificial Sequence
  source: /note="Description of Artificial Sequence: Synthetic oligonucleotide"
  source: /note="Description of Combined DNA/RNA Molecule: Synthetic oligonucleotide"
  source: /note="DNA/RNA"
  modified_base (1)..(1): bicyclic nucleic acid (BNA)
  modified_base (2)..(2): bicyclic nucleic acid (BNA)
  modified_base (3)..(3): 5-methyl modified nucleotide
  modified_base (6)..(6): 5-methyl modified nucleotide
  modified_base (18)..(18): 5-methyl modified nucleotide
  modified_base (19)..(19): bicyclic nucleic acid (BNA)
  modified_base (20)..(20): bicyclic nucleic acid (BNA)
aacaucaaggaagauggcat

SEQ ID NO: 20939 - RNA, 19 nt, Artificial Sequence
  source: /note="Description of Artificial Sequence: Synthetic oligonucleotide"
  source: /note="RNA"
  modified_base (1)..(1): bicyclic nucleic acid (BNA)
  modified_base (2)..(2): bicyclic nucleic acid (BNA)
  modified_base (3)..(3): 5-methyl modified nucleotide
  modified_base (6)..(6): 5-methyl modified nucleotide
  modified_base (18)..(18): 5-methyl bicyclic nucleic acid
  modified_base (19)..(19): bicyclic nucleic acid (BNA)
aacaucaaggaagauggca

SEQ ID NO: 20940 - RNA, 18 nt, Artificial Sequence
  source: /note="Description of Artificial Sequence: Synthetic oligonucleotide"
  source: /note="RNA"
  modified_base (1)..(1): bicyclic nucleic acid (BNA)
  modified_base (2)..(2): bicyclic nucleic acid (BNA)
  modified_base (3)..(3): 5-methyl modified nucleotide
  modified_base (6)..(6): 5-methyl modified nucleotide
  modified_base (17)..(17): bicyclic nucleic acid (BNA)
  modified_base (18)..(18): 5-methyl bicyclic nucleic acid
aacaucaaggaagauggc

SEQ ID NO: 20941 - RNA, 17 nt, Artificial Sequence
  source: /note="Description of Artificial Sequence: Synthetic oligonucleotide"
  source: /note="RNA"
  modified_base (1)..(1): bicyclic nucleic acid (BNA)
  modified_base (2)..(2): bicyclic nucleic acid (BNA)
  modified_base (3)..(3): 5-methyl modified nucleotide
  modified_base (6)..(6): 5-methyl modified nucleotide
  modified_base (16)..(16): bicyclic nucleic acid (BNA)
  modified_base (17)..(17): bicyclic nucleic acid (BNA)
aacaucaaggaagaugg

SEQ ID NO: 20942 - DNA, 16 bp, Artificial Sequence
  source: /note="Description of Artificial Sequence: Synthetic oligonucleotide"
  source: /note="Description of Combined DNA/RNA Molecule: Synthetic oligonucleotide"
  source: /note="DNA/RNA"
  modified_base (1)..(1): bicyclic nucleic acid (BNA)
  modified_base (2)..(2): bicyclic nucleic acid (BNA)
  modified_base (3)..(3): 5-methyl modified nucleotide
  modified_base (6)..(6): 5-methyl modified nucleotide
  modified_base (15)..(15): bicyclic nucleic acid (BNA)
  modified_base (16)..(16): bicyclic nucleic acid (BNA)
aacaucaaggaagatg

SEQ ID NO: 20943 - DNA, 15 bp, Artificial Sequence
  source: /note="Description of Artificial Sequence: Synthetic oligonucleotide"
  source: /note="Description of Combined DNA/RNA Molecule: Synthetic oligonucleotide"
  source: /note="DNA/RNA"
  modified_base (1)..(1): bicyclic nucleic acid (BNA)
  modified_base (2)..(2): bicyclic nucleic acid (BNA)
  modified_base (3)..(3): 5-methyl modified nucleotide
  modified_base (6)..(6): 5-methyl modified nucleotide
  modified_base (14)..(14): bicyclic nucleic acid (BNA)
  modified_base (15)..(15): bicyclic nucleic acid (BNA)
aacaucaaggaagat

SEQ ID NO: 20944 - RNA, 14 nt, Artificial Sequence
  source: /note="Description of Artificial Sequence: Synthetic oligonucleotide"
  source: /note="RNA"
  modified_base (1)..(1): bicyclic nucleic acid (BNA)
  modified_base (2)..(2): bicyclic nucleic acid (BNA)
  modified_base (3)..(3): 5-methyl modified nucleotide
  modified_base (6)..(6): 5-methyl modified nucleotide
  modified_base (13)..(13): bicyclic nucleic acid (BNA)
  modified_base (14)..(14): bicyclic nucleic acid (BNA)
aacaucaaggaaga

SEQ ID NO: 20945 - RNA, 13 nt, Artificial Sequence
  source: /note="Description of Artificial Sequence: Synthetic oligonucleotide"
  source: /note="RNA"
  modified_base (1)..(1): bicyclic nucleic acid (BNA)
  modified_base (2)..(2): bicyclic nucleic acid (BNA)
  modified_base (3)..(3): 5-methyl modified nucleotide
  modified_base (6)..(6): 5-methyl modified nucleotide
  modified_base (12)..(12): bicyclic nucleic acid (BNA)
  modified_base (13)..(13): bicyclic nucleic acid (BNA)
aacaucaaggaag

SEQ ID NO: 20946 - RNA, 25 nt, Artificial Sequence
  source: /note="Description of Artificial Sequence: Synthetic oligonucleotide"
  source: /note="RNA"
  modified_base (1)..(1): bicyclic nucleic acid (BNA)
  modified_base (2)..(2): 5-methyl bicyclic nucleic acid
  modified_base (5)..(5): 5-methyl modified nucleotide
  modified_base (17)..(17): 5-methyl modified nucleotide
  modified_base (22)..(22): 5-methyl modified nucleotide
  modified_base (24)..(24): bicyclic nucleic acid (BNA)
  modified_base (25)..(25): bicyclic nucleic acid (BNA)
acaucaaggaagauggcauuucuag

SEQ ID NO: 20947 - DNA, 24 bp, Artificial Sequence
  source: /note="Description of Artificial Sequence: Synthetic oligonucleotide"
  source: /note="Description of Combined DNA/RNA Molecule: Synthetic oligonucleotide"
  source: /note="DNA/RNA"
  modified_base (1)..(1): bicyclic nucleic acid (BNA)
  modified_base (2)..(2): 5-methyl bicyclic nucleic acid
  modified_base (5)..(5): 5-methyl modified nucleotide
  modified_base (17)..(17): 5-methyl modified nucleotide
  modified_base (22)..(22): 5-methyl modified nucleotide
  modified_base (23)..(23): bicyclic nucleic acid (BNA)
  modified_base (24)..(24): bicyclic nucleic acid (BNA)
acaucaaggaagauggcauuucta

SEQ ID NO: 20948 - DNA, 23 bp, Artificial Sequence
  source: /note="Description of Artificial Sequence: Synthetic oligonucleotide"
  source: /note="Description of Combined DNA/RNA Molecule: Synthetic oligonucleotide"
  source: /note="DNA/RNA"
  modified_base (1)..(1): bicyclic nucleic acid (BNA)
  modified_base (2)..(2): 5-methyl bicyclic nucleic acid
  modified_base (5)..(5): 5-methyl modified nucleotide
  modified_base (17)..(17): 5-methyl modified nucleotide
  modified_base (22)..(22): 5-methyl bicyclic nucleic acid
  modified_base (23)..(23): bicyclic nucleic acid (BNA)
acaucaaggaagauggcauuuct

SEQ ID NO: 20949 - DNA, 22 bp, Artificial Sequence
  source: /note="Description of Artificial Sequence: Synthetic oligonucleotide"
  source: /note="Description of Combined DNA/RNA Molecule: Synthetic oligonucleotide"
  source: /note="DNA/RNA"
  modified_base (1)..(1): bicyclic nucleic acid (BNA)
  modified_base (2)..(2): 5-methyl bicyclic nucleic acid
  modified_base (5)..(5): 5-methyl modified nucleotide
  modified_base (17)..(17): 5-methyl modified nucleotide
  modified_base (21)..(21): bicyclic nucleic acid (BNA)
  modified_base (22)..(22): 5-methyl bicyclic nucleic acid
acaucaaggaagauggcauutc

SEQ ID NO: 20950 - DNA, 21 bp, Artificial Sequence
  source: /note="Description of Artificial Sequence: Synthetic oligonucleotide"
  source: /note="Description of Combined DNA/RNA Molecule: Synthetic oligonucleotide"
  source: /note="DNA/RNA"
  modified_base (1)..(1): bicyclic nucleic acid (BNA)
  modified_base (2)..(2): 5-methyl bicyclic nucleic acid
  modified_base (5)..(5): 5-methyl modified nucleotide
  modified_base (17)..(17): 5-methyl modified nucleotide
  modified_base (20)..(20): bicyclic nucleic acid (BNA)
  modified_base (21)..(21): bicyclic nucleic acid (BNA)
acaucaaggaagauggcautt

SEQ ID NO: 20951 - DNA, 20 bp, Artificial Sequence
  source: /note="Description of Artificial Sequence: Synthetic oligonucleotide"
  source: /note="Description of Combined DNA/RNA Molecule: Synthetic oligonucleotide"
  source: /note="DNA/RNA"
  modified_base (1)..(1): bicyclic nucleic acid (BNA)
  modified_base (2)..(2): 5-methyl bicyclic nucleic acid
  modified_base (5)..(5): 5-methyl modified nucleotide
  modified_base (17)..(17): 5-methyl modified nucleotide
  modified_base (19)..(19): bicyclic nucleic acid (BNA)
  modified_base (20)..(20): bicyclic nucleic acid (BNA)
acaucaaggaagauggcatt

SEQ ID NO: 20952 - DNA, 19 bp, Artificial Sequence
  source: /note="Description of Artificial Sequence: Synthetic oligonucleotide"
  source: /note="Description of Combined DNA/RNA Molecule: Synthetic oligonucleotide"
  source: /note="DNA/RNA"
  modified_base (1)..(1): bicyclic nucleic acid (BNA)
  modified_base (2)..(2): 5-methyl bicyclic nucleic acid
  modified_base (5)..(5): 5-methyl modified nucleotide
  modified_base (17)..(17): 5-methyl modified nucleotide
  modified_base (18)..(18): bicyclic nucleic acid (BNA)
  modified_base (19)..(19): bicyclic nucleic acid (BNA)
acaucaaggaagauggcat

SEQ ID NO: 20953 - RNA, 18 nt, Artificial Sequence
  source: /note="Description of Artificial Sequence: Synthetic oligonucleotide"
  source: /note="RNA"
  modified_base (1)..(1): bicyclic nucleic acid (BNA)
  modified_base (2)..(2): 5-methyl bicyclic nucleic acid
  modified_base (5)..(5): 5-methyl modified nucleotide
  modified_base (17)..(17): 5-methyl bicyclic nucleic acid
  modified_base (18)..(18): bicyclic nucleic acid (BNA)
acaucaaggaagauggca

SEQ ID NO: 20954 - RNA, 17 nt, Artificial Sequence
  source: /note="Description of Artificial Sequence: Synthetic oligonucleotide"
  source: /note="RNA"
  modified_base (1)..(1): bicyclic nucleic acid (BNA)
  modified_base (2)..(2): 5-methyl bicyclic nucleic acid
  modified_base (5)..(5): 5-methyl modified nucleotide
  modified_base (16)..(16): bicyclic nucleic acid (BNA)
  modified_base (17)..(17): 5-methyl bicyclic nucleic acid
acaucaaggaagauggc

SEQ ID NO: 20955 - RNA, 16 nt, Artificial Sequence
  source: /note="Description of Artificial Sequence: Synthetic oligonucleotide"
  source: /note="RNA"
  modified_base (1)..(1): bicyclic nucleic acid (BNA)
  modified_base (2)..(2): 5-methyl bicyclic nucleic acid
  modified_base (5)..(5): 5-methyl modified nucleotide
  modified_base (15)..(15): bicyclic nucleic acid (BNA)
  modified_base (16)..(16): bicyclic nucleic acid (BNA)
acaucaaggaagaugg

SEQ ID NO: 20956 - DNA, 15 bp, Artificial Sequence
  source: /note="Description of Artificial Sequence: Synthetic oligonucleotide"
  source: /note="Description of Combined DNA/RNA Molecule: Synthetic oligonucleotide"
  source: /note="DNA/RNA"
  modified_base (1)..(1): bicyclic nucleic acid (BNA)
  modified_base (2)..(2): 5-methyl bicyclic nucleic acid
  modified_base (5)..(5): 5-methyl modified nucleotide
  modified_base (14)..(14): bicyclic nucleic acid (BNA)
  modified_base (15)..(15): bicyclic nucleic acid (BNA)
acaucaaggaagatg

SEQ ID NO: 20957 - DNA, 14 bp, Artificial Sequence
  source: /note="Description of Artificial Sequence: Synthetic oligonucleotide"
  source: /note="Description of Combined DNA/RNA Molecule: Synthetic oligonucleotide"
  source: /note="DNA/RNA"
  modified_base (1)..(1): bicyclic nucleic acid (BNA)
  modified_base (2)..(2): 5-methyl bicyclic nucleic acid
  modified_base (5)..(5): 5-methyl modified nucleotide
  modified_base (13)..(13): bicyclic nucleic acid (BNA)
  modified_base (14)..(14): bicyclic nucleic acid (BNA)
acaucaaggaagat

SEQ ID NO: 20958 - RNA, 13 nt, Artificial Sequence
  source: /note="Description of Artificial Sequence: Synthetic oligonucleotide"
  source: /note="RNA"
  modified_base (1)..(1): bicyclic nucleic acid (BNA)
  modified_base (2)..(2): 5-methyl bicyclic nucleic acid
  modified_base (5)..(5): 5-methyl modified nucleotide
  modified_base (12)..(12): bicyclic nucleic acid (BNA)
  modified_base (13)..(13): bicyclic nucleic acid (BNA)
acaucaaggaaga

SEQ ID NO: 20959 - RNA, 12 nt, Artificial Sequence
  source: /note="Description of Artificial Sequence: Synthetic oligonucleotide"
  source: /note="RNA"
  modified_base (1)..(1): bicyclic nucleic acid (BNA)
  modified_base (2)..(2): 5-methyl bicyclic nucleic acid
  modified_base (5)..(5): 5-methyl modified nucleotide
  modified_base (11)..(11): bicyclic nucleic acid (BNA)
  modified_base (12)..(12): bicyclic nucleic acid (BNA)
acaucaaggaag

SEQ ID NO: 20960 - RNA, 24 nt, Artificial Sequence
  source: /note="Description of Artificial Sequence: Synthetic oligonucleotide"
  source: /note="RNA"
  modified_base (1)..(1): 5-methyl bicyclic nucleic acid
  modified_base (2)..(2): bicyclic nucleic acid (BNA)
  modified_base (4)..(4): 5-methyl modified nucleotide
  modified_base (16)..(16): 5-methyl modified nucleotide
  modified_base (21)..(21): 5-methyl modified nucleotide
  modified_base (23)..(23): bicyclic nucleic acid (BNA)
  modified_base (24)..(24): bicyclic nucleic acid (BNA)
caucaaggaagauggcauuucuag

SEQ ID NO: 20961 - DNA, 23 bp, Artificial Sequence
  source: /note="Description of Artificial Sequence: Synthetic oligonucleotide"
  source: /note="Description of Combined DNA/RNA Molecule: Synthetic oligonucleotide"
  source: /note="DNA/RNA"
  modified_base (1)..(1): 5-methyl bicyclic nucleic acid
  modified_base (2)..(2): bicyclic nucleic acid (BNA)
  modified_base (4)..(4): 5-methyl modified nucleotide
  modified_base (16)..(16): 5-methyl modified nucleotide
  modified_base (21)..(21): 5-methyl modified nucleotide
  modified_base (22)..(22): bicyclic nucleic acid (BNA)
  modified_base (23)..(23): bicyclic nucleic acid (BNA)
caucaaggaagauggcauuucta

SEQ ID NO: 20962 - DNA, 22 bp, Artificial Sequence
  source: /note="Description of Artificial Sequence: Synthetic oligonucleotide"
  source: /note="Description of Combined DNA/RNA Molecule: Synthetic oligonucleotide"
  source: /note="DNA/RNA"
  modified_base (1)..(1): 5-methyl bicyclic nucleic acid
  modified_base (2)..(2): bicyclic nucleic acid (BNA)
  modified_base (4)..(4): 5-methyl modified nucleotide
  modified_base (16)..(16): 5-methyl modified nucleotide
  modified_base (21)..(21): 5-methyl bicyclic nucleic acid
  modified_base (22)..(22): bicyclic nucleic acid (BNA)
caucaaggaagauggcauuuct

SEQ ID NO: 20963 - DNA, 21 bp, Artificial Sequence
  source: /note="Description of Artificial Sequence: Synthetic oligonucleotide"
  source: /note="Description of Combined DNA/RNA Molecule: Synthetic oligonucleotide"
  source: /note="DNA/RNA"
  modified_base (1)..(1): 5-methyl bicyclic nucleic acid
  modified_base (2)..(2): bicyclic nucleic acid (BNA)
  modified_base (4)..(4): 5-methyl modified nucleotide
  modified_base (16)..(16): 5-methyl modified nucleotide
  modified_base (20)..(20): bicyclic nucleic acid (BNA)
  modified_base (21)..(21): 5-methyl bicyclic nucleic acid
caucaaggaagauggcauutc

SEQ ID NO: 20964 - DNA, 20 bp, Artificial Sequence
  source: /note="Description of Artificial Sequence: Synthetic oligonucleotide"
  source: /note="Description of Combined DNA/RNA Molecule: Synthetic oligonucleotide"
  source: /note="DNA/RNA"
  modified_base (1)..(1): 5-methyl bicyclic nucleic acid
  modified_base (2)..(2): bicyclic nucleic acid (BNA)
  modified_base (4)..(4): 5-methyl modified nucleotide
  modified_base (16)..(16): 5-methyl modified nucleotide
  modified_base (19)..(19): bicyclic nucleic acid (BNA)
  modified_base (20)..(20): bicyclic nucleic acid (BNA)
caucaaggaagauggcautt

SEQ ID NO: 20965 - DNA, 19 bp, Artificial Sequence
  source: /note="Description of Artificial Sequence: Synthetic oligonucleotide"
  source: /note="Description of Combined DNA/RNA Molecule: Synthetic oligonucleotide"
  source: /note="DNA/RNA"
  modified_base (1)..(1): 5-methyl bicyclic nucleic acid
  modified_base (2)..(2): bicyclic nucleic acid (BNA)
  modified_base (4)..(4): 5-methyl modified nucleotide
  modified_base (16)..(16): 5-methyl modified nucleotide
  modified_base (18)..(18): bicyclic nucleic acid (BNA)
  modified_base (19)..(19): bicyclic nucleic acid (BNA)
caucaaggaagauggcatt

SEQ ID NO: 20966 - DNA, 18 bp, Artificial Sequence
  source: /note="Description of Artificial Sequence: Synthetic oligonucleotide"
  source: /note="Description of Combined DNA/RNA Molecule: Synthetic oligonucleotide"
  source: /note="DNA/RNA"
  modified_base (1)..(1): 5-methyl bicyclic nucleic acid
  modified_base (2)..(2): bicyclic nucleic acid (BNA)
  modified_base (4)..(4): 5-methyl modified nucleotide
  modified_base (16)..(16): 5-methyl modified nucleotide
  modified_base (17)..(17): bicyclic nucleic acid (BNA)
  modified_base (18)..(18): bicyclic nucleic acid (BNA)
caucaaggaagauggcat

SEQ ID NO: 20967 - RNA, 17 nt, Artificial Sequence
  source: /note="Description of Artificial Sequence: Synthetic oligonucleotide"
  source: /note="RNA"
  modified_base (1)..(1): 5-methyl bicyclic nucleic acid
  modified_base (2)..(2): bicyclic nucleic acid (BNA)
  modified_base (4)..(4): 5-methyl modified nucleotide
  modified_base (16)..(16): 5-methyl bicyclic nucleic acid
  modified_base (17)..(17): bicyclic nucleic acid (BNA)
caucaaggaagauggca

SEQ ID NO: 20968 - RNA, 16 nt, Artificial Sequence
  source: /note="Description of Artificial Sequence: Synthetic oligonucleotide"
  source: /note="RNA"
  modified_base (1)..(1): 5-methyl bicyclic nucleic acid
  modified_base (2)..(2): bicyclic nucleic acid (BNA)
  modified_base (4)..(4): 5-methyl modified nucleotide
  modified_base (15)..(15): bicyclic nucleic acid (BNA)
  modified_base (16)..(16): 5-methyl bicyclic nucleic acid
caucaaggaagauggc

SEQ ID NO: 20969 - RNA, 15 nt, Artificial Sequence
  source: /note="Description of Artificial Sequence: Synthetic oligonucleotide"
  source: /note="RNA"
  modified_base (1)..(1): 5-methyl bicyclic nucleic acid
  modified_base (2)..(2): bicyclic nucleic acid (BNA)
  modified_base (4)..(4): 5-methyl modified nucleotide
  modified_base (14)..(14): bicyclic nucleic acid (BNA)
  modified_base (15)..(15): bicyclic nucleic acid (BNA)
caucaaggaagaugg

SEQ ID NO: 20970 - DNA, 14 bp, Artificial Sequence
  source: /note="Description of Artificial Sequence: Synthetic oligonucleotide"
  source: /note="Description of Combined DNA/RNA Molecule: Synthetic oligonucleotide"
  source: /note="DNA/RNA"
  modified_base (1)..(1): 5-methyl bicyclic nucleic acid
  modified_base (2)..(2): bicyclic nucleic acid (BNA)
  modified_base (4)..(4): 5-methyl modified nucleotide
  modified_base (13)..(13): bicyclic nucleic acid (BNA)
  modified_base (14)..(14): bicyclic nucleic acid (BNA)
caucaaggaagatg

SEQ ID NO: 20971 - DNA, 13 bp, Artificial Sequence
  source: /note="Description of Artificial Sequence: Synthetic oligonucleotide"
  source: /note="Description of Combined DNA/RNA Molecule: Synthetic oligonucleotide"
  source: /note="DNA/RNA"
  modified_base (1)..(1): 5-methyl bicyclic nucleic acid
  modified_base (2)..(2): bicyclic nucleic acid (BNA)
  modified_base (4)..(4): 5-methyl modified nucleotide
  modified_base (12)..(12): bicyclic nucleic acid (BNA)
  modified_base (13)..(13): bicyclic nucleic acid (BNA)
caucaaggaagat

SEQ ID NO: 20972 - RNA, 12 nt, Artificial Sequence
  source: /note="Description of Artificial Sequence: Synthetic oligonucleotide"
  source: /note="RNA"
  modified_base (1)..(1): 5-methyl bicyclic nucleic acid
  modified_base (2)..(2): bicyclic nucleic acid (BNA)
  modified_base (4)..(4): 5-methyl modified nucleotide
  modified_base (11)..(11): bicyclic nucleic acid (BNA)
  modified_base (12)..(12): bicyclic nucleic acid (BNA)
caucaaggaaga

SEQ ID NO: 20973 - RNA, 11 nt, Artificial Sequence
  source: /note="Description of Artificial Sequence: Synthetic oligonucleotide"
  source: /note="RNA"
  modified_base (1)..(1): 5-methyl bicyclic nucleic acid
  modified_base (2)..(2): bicyclic nucleic acid (BNA)
  modified_base (4)..(4): 5-methyl modified nucleotide
  modified_base (10)..(10): bicyclic nucleic acid (BNA)
  modified_base (11)..(11): bicyclic nucleic acid (BNA)
caucaaggaag

SEQ ID NO: 20974 - DNA, 23 bp, Artificial Sequence
  source: /note="Description of Artificial Sequence: Synthetic oligonucleotide"
  source: /note="Description of Combined DNA/RNA Molecule: Synthetic oligonucleotide"
  source: /note="DNA/RNA"
  modified_base (1)..(1): bicyclic nucleic acid (BNA)
  modified_base (2)..(2): bicyclic nucleic acid (BNA)
  modified_base (3)..(3): 5-methyl modified nucleotide
  modified_base (15)..(15): 5-methyl modified nucleotide
  modified_base (20)..(20): 5-methyl modified nucleotide
  modified_base (22)..(22): bicyclic nucleic acid (BNA)
  modified_base (23)..(23): bicyclic nucleic acid (BNA)
atcaaggaagauggcauuucuag

SEQ ID NO: 20975 - DNA, 22 bp, Artificial Sequence
  source: /note="Description of Artificial Sequence: Synthetic oligonucleotide"
  source: /note="Description of Combined DNA/RNA Molecule: Synthetic oligonucleotide"
  source: /note="DNA/RNA"
  modified_base (1)..(1): bicyclic nucleic acid (BNA)
  modified_base (2)..(2): bicyclic nucleic acid (BNA)
  modified_base (3)..(3): 5-methyl modified nucleotide
  modified_base (15)..(15): 5-methyl modified nucleotide
  modified_base (20)..(20): 5-methyl modified nucleotide
  modified_base (21)..(21): bicyclic nucleic acid (BNA)
  modified_base (22)..(22): bicyclic nucleic acid (BNA)
atcaaggaagauggcauuucta

SEQ ID NO: 20976 - DNA, 21 bp, Artificial Sequence
  source: /note="Description of Artificial Sequence: Synthetic oligonucleotide"
  source: /note="Description of Combined DNA/RNA Molecule: Synthetic oligonucleotide"
  source: /note="DNA/RNA"
  modified_base (1)..(1): bicyclic nucleic acid (BNA)
  modified_base (2)..(2): bicyclic nucleic acid (BNA)
  modified_base (3)..(3): 5-methyl modified nucleotide
  modified_base (15)..(15): 5-methyl modified nucleotide
  modified_base (20)..(20): 5-methyl bicyclic nucleic acid
  modified_base (21)..(21): bicyclic nucleic acid (BNA)
atcaaggaagauggcauuuct

SEQ ID NO: 20977 - DNA, 20 bp, Artificial Sequence
  source: /note="Description of Artificial Sequence: Synthetic oligonucleotide"
  source: /note="Description of Combined DNA/RNA Molecule: Synthetic oligonucleotide"
  source: /note="DNA/RNA"
  modified_base (1)..(1): bicyclic nucleic acid (BNA)
  modified_base (2)..(2): bicyclic nucleic acid (BNA)
  modified_base (3)..(3): 5-methyl modified nucleotide
  modified_base (15)..(15): 5-methyl modified nucleotide
  modified_base (19)..(19): bicyclic nucleic acid (BNA)
  modified_base (20)..(20): 5-methyl bicyclic nucleic acid
atcaaggaagauggcauutc

SEQ ID NO: 20978 - DNA, 19 bp, Artificial Sequence
  source: /note="Description of Artificial Sequence: Synthetic oligonucleotide"
  source: /note="Description of Combined DNA/RNA Molecule: Synthetic oligonucleotide"
  source: /note="DNA/RNA"
  modified_base (1)..(1): bicyclic nucleic acid (BNA)
  modified_base (2)..(2): bicyclic nucleic acid (BNA)
  modified_base (3)..(3): 5-methyl modified nucleotide
  modified_base (15)..(15): 5-methyl modified nucleotide
  modified_base (18)..(18): bicyclic nucleic acid (BNA)
  modified_base (19)..(19): bicyclic nucleic acid (BNA)
atcaaggaagauggcautt

SEQ ID NO: 20979 - DNA, 18 bp, Artificial Sequence
  source: /note="Description of Artificial Sequence: Synthetic oligonucleotide"
  source: /note="Description of Combined DNA/RNA Molecule: Synthetic oligonucleotide"
  source: /note="DNA/RNA"
  modified_base (1)..(1): bicyclic nucleic acid (BNA)
  modified_base (2)..(2): bicyclic nucleic acid (BNA)
  modified_base (3)..(3): 5-methyl modified nucleotide
  modified_base (15)..(15): 5-methyl modified nucleotide
  modified_base (17)..(17): bicyclic nucleic acid (BNA)
  modified_base (18)..(18): bicyclic nucleic acid (BNA)
atcaaggaagauggcatt

SEQ ID NO: 20980 - DNA, 17 bp, Artificial Sequence
  source: /note="Description of Artificial Sequence: Synthetic oligonucleotide"
  source: /note="Description of Combined DNA/RNA Molecule: Synthetic oligonucleotide"
  source: /note="DNA/RNA"
  modified_base (1)..(1): bicyclic nucleic acid (BNA)
  modified_base (2)..(2): bicyclic nucleic acid (BNA)
  modified_base (3)..(3): 5-methyl modified nucleotide
  modified_base (15)..(15): 5-methyl modified nucleotide
  modified_base (16)..(16): bicyclic nucleic acid (BNA)
  modified_base (17)..(17): bicyclic nucleic acid (BNA)
atcaaggaagauggcat

SEQ ID NO: 20981 - DNA, 16 bp, Artificial Sequence
  source: /note="Description of Artificial Sequence: Synthetic oligonucleotide"
  source: /note="Description of Combined DNA/RNA Molecule: Synthetic oligonucleotide"
  source: /note="DNA/RNA"
  modified_base (1)..(1): bicyclic nucleic acid (BNA)
  modified_base (2)..(2): bicyclic nucleic acid (BNA)
  modified_base (3)..(3): 5-methyl modified nucleotide
  modified_base (15)..(15): 5-methyl bicyclic nucleic acid
  modified_base (16)..(16): bicyclic nucleic acid (BNA)
atcaaggaagauggca

SEQ ID NO: 20982 - DNA, 15 bp, Artificial Sequence
  source: /note="Description of Artificial Sequence: Synthetic oligonucleotide"
  source: /note="Description of Combined DNA/RNA Molecule: Synthetic oligonucleotide"
  source: /note="DNA/RNA"
  modified_base (1)..(1): bicyclic nucleic acid (BNA)
  modified_base (2)..(2): bicyclic nucleic acid (BNA)
  modified_base (3)..(3): 5-methyl modified nucleotide
  modified_base (14)..(14): bicyclic nucleic acid (BNA)
  modified_base (15)..(15): 5-methyl bicyclic nucleic acid
atcaaggaagauggc

SEQ ID NO: 20983 - DNA, 14 bp, Artificial Sequence
  source: /note="Description of Artificial Sequence: Synthetic oligonucleotide"
  source: /note="Description of Combined DNA/RNA Molecule: Synthetic oligonucleotide"
  source: /note="DNA/RNA"
  modified_base (1)..(1): bicyclic nucleic acid (BNA)
  modified_base (2)..(2): bicyclic nucleic acid (BNA)
  modified_base (3)..(3): 5-methyl modified nucleotide
  modified_base (13)..(13): bicyclic nucleic acid (BNA)
  modified_base (14)..(14): bicyclic nucleic acid (BNA)
atcaaggaagaugg

SEQ ID NO: 20984 - DNA, 13 bp, Artificial Sequence
  source: /note="Description of Artificial Sequence: Synthetic oligonucleotide"
  source: /note="DNA/RNA"
  modified_base (1)..(1): bicyclic nucleic acid (BNA)
  modified_base (2)..(2): bicyclic nucleic acid (BNA)
  modified_base (3)..(3): 5-methyl modified nucleotide
  modified_base (12)..(12): bicyclic nucleic acid (BNA)
  modified_base (13)..(13): bicyclic nucleic acid (BNA)
atcaaggaagatg

SEQ ID NO: 20985 - DNA, 12 bp, Artificial Sequence
  source: /note="Description of Artificial Sequence: Synthetic oligonucleotide"
  source: /note="DNA/RNA"
  modified_base (1)..(1): bicyclic nucleic acid (BNA)
  modified_base (2)..(2): bicyclic nucleic acid (BNA)
  modified_base (3)..(3): 5-methyl modified nucleotide
  modified_base (11)..(11): bicyclic nucleic acid (BNA)
  modified_base (12)..(12): bicyclic nucleic acid (BNA)
atcaaggaagat

SEQ ID NO: 20986 - DNA, 11 bp, Artificial Sequence
  source: /note="Description of Artificial Sequence: Synthetic oligonucleotide"
  source: /note="DNA/RNA"
  modified_base (1)..(1): bicyclic nucleic acid (BNA)
  modified_base (2)..(2): bicyclic nucleic acid (BNA)
  modified_base (3)..(3): 5-methyl modified nucleotide
  modified_base (10)..(10): bicyclic nucleic acid (BNA)
  modified_base (11)..(11): bicyclic nucleic acid (BNA)
atcaaggaaga

SEQ ID NO: 20987 - DNA, 10 bp, Artificial Sequence
  source: /note="Description of Artificial Sequence: Synthetic oligonucleotide"
  source: /note="DNA/RNA"
  modified_base (1)..(1): bicyclic nucleic acid (BNA)
  modified_base (2)..(2): bicyclic nucleic acid (BNA)
  modified_base (3)..(3): 5-methyl modified nucleotide
  modified_base (9)..(9): bicyclic nucleic acid (BNA)
  modified_base (10)..(10): bicyclic nucleic acid (BNA)
atcaaggaag

SEQ ID NO: 20988 - DNA, 23 bp, Artificial Sequence
  source: /note="Description of Artificial Sequence: Synthetic oligonucleotide"
  source: /note="Description of Combined DNA/RNA Molecule: Synthetic oligonucleotide"
  source: /note="DNA/RNA"
  modified_base (1)..(1): 5-methyl bicyclic nucleic acid
  modified_base (2)..(2): 5-methyl bicyclic nucleic acid
  modified_base (7)..(7): 5-methyl modified nucleotide
  modified_base (13)..(13): 5-methyl modified nucleotide
  modified_base (14)..(14): 5-methyl modified nucleotide
  modified_base (16)..(16): 5-methyl modified nucleotide
  modified_base (17)..(17): 5-methyl modified nucleotide
  modified_base (20)..(20): 5-methyl modified nucleotide
  modified_base (22)..(22): bicyclic nucleic acid (BNA)
  modified_base (23)..(23): 5-methyl bicyclic nucleic acid
ccagagcagguaccuccaacatc

SEQ ID NO: 20989 - RNA, 18 nt, Artificial Sequence
  source: /note="Description of Artificial Sequence: Synthetic oligonucleotide"
  source: /note="RNA"
  modified_base (1)..(1): 5-methyl bicyclic nucleic acid
  modified_base (2)..(2): 5-methyl bicyclic nucleic acid
  modified_base (7)..(7): 5-methyl modified nucleotide
  modified_base (13)..(13): 5-methyl modified nucleotide
  modified_base (14)..(14): 5-methyl modified nucleotide
  modified_base (16)..(16): 5-methyl modified nucleotide
  modified_base (17)..(17): 5-methyl bicyclic nucleic acid
  modified_base (18)..(18): bicyclic nucleic acid (BNA)
ccagagcagguaccucca

SEQ ID NO: 20990 - DNA, 23 bp, Artificial Sequence
  source: /note="Description of Artificial Sequence: Synthetic oligonucleotide"
  source: /note="Description of Combined DNA/RNA Molecule: Synthetic oligonucleotide"
  source: /note="DNA/RNA"
  modified_base (1)..(1): 5-methyl bicyclic nucleic acid
  modified_base (2)..(2): 5-methyl bicyclic nucleic acid
  modified_base (4)..(4): 5-methyl modified nucleotide
  modified_base (18)..(18): 5-methyl modified nucleotide
  modified_base (22)..(22): bicyclic nucleic acid (BNA)
  modified_base (23)..(23): bicyclic nucleic acid (BNA)
ccucugugauuuuauaacuugat

SEQ ID NO: 20991 - DNA, 17 bp, Artificial Sequence
  source: /note="Description of Artificial Sequence: Synthetic oligonucleotide"
  source: /note="Description of Combined DNA/RNA Molecule: Synthetic oligonucleotide"
  source: /note="DNA/RNA"
  modified_base (1)..(1): bicyclic nucleic acid (BNA)
  modified_base (2)..(2): 5-methyl bicyclic nucleic acid
  modified_base (4)..(4): 5-methyl modified nucleotide
  modified_base (5)..(5): 5-methyl modified nucleotide
  modified_base (6)..(6): 5-methyl modified nucleotide
  modified_base (8)..(8): 5-methyl modified nucleotide
  modified_base (9)..(9): 5-methyl modified nucleotide
  modified_base (12)..(12): 5-methyl modified nucleotide
  modified_base (14)..(14): 5-methyl modified nucleotide
  modified_base (15)..(15): 5-methyl modified nucleotide
  modified_base (16)..(16): 5-methyl bicyclic nucleic acid
  modified_base (17)..(17): bicyclic nucleic acid (BNA)
tcacccaccaucaccct

SEQ ID NO: 20992 - DNA, 20 bp, Artificial Sequence
  source: /note="Description of Artificial Sequence: Synthetic oligonucleotide"
  source: /note="Description of Combined DNA/RNA Molecule: Synthetic oligonucleotide"
  source: /note="DNA/RNA"
  modified_base (1)..(1): bicyclic nucleic acid (BNA)
  modified_base (2)..(2): bicyclic nucleic acid (BNA)
  modified_base (7)..(7): 5-methyl modified nucleotide
  modified_base (8)..(8): 5-methyl modified nucleotide
  modified_base (10)..(10): 5-methyl modified nucleotide
  modified_base (16)..(16): 5-methyl modified nucleotide
  modified_base (18)..(18): 5-methyl modified nucleotide
  modified_base (19)..(19): 5-methyl bicyclic nucleic acid
  modified_base (20)..(20): 5-methyl bicyclic nucleic acid
tgauauccucaaggucaccc

SEQ ID NO: 20993 - DNA, 22 bp, Artificial Sequence
  source: /note="Description of Artificial Sequence: Synthetic oligonucleotide"
  source: /note="Description of Combined DNA/RNA Molecule: Synthetic oligonucleotide"
  source: /note="DNA/RNA"
  modified_base (1)..(1): 5-methyl bicyclic nucleic acid
  modified_base (2)..(2): bicyclic nucleic acid (BNA)
  modified_base (4)..(4): 5-methyl modified nucleotide
  modified_base (13)..(13): 5-methyl modified nucleotide
  modified_base (16)..(16): 5-methyl modified nucleotide
  modified_base (18)..(18): 5-methyl modified nucleotide
  modified_base (21)..(21): bicyclic nucleic acid (BNA)
  modified_base (22)..(22): bicyclic nucleic acid (BNA)
ctgcuugaugaucaucucgutg

SEQ ID NO: 20994 - DNA, 18 bp, Artificial Sequence
  source: /note="Description of Artificial Sequence: Synthetic oligonucleotide"
  source: /note="Description of Combined DNA/RNA Molecule: Synthetic oligonucleotide"
  source: /note="DNA/RNA"
  modified_base (1)..(1): 5-methyl bicyclic nucleic acid
  modified_base (2)..(2): bicyclic nucleic acid (BNA)
  modified_base (4)..(4): 5-methyl modified nucleotide
  modified_base (13)..(13): 5-methyl modified nucleotide
  modified_base (16)..(16): 5-methyl modified nucleotide
  modified_base (17)..(17): bicyclic nucleic acid (BNA)
  modified_base (18)..(18): 5-methyl bicyclic nucleic acid
ctgcuugaugaucauctc

SEQ ID NO: 20995 - DNA, 19 bp, Artificial Sequence
  source: /note="Description of Artificial Sequence: Synthetic oligonucleotide"
  source: /note="Description of Combined DNA/RNA Molecule: Synthetic oligonucleotide"
  source: /note="DNA/RNA"
  modified_base (1)..(1): bicyclic nucleic acid (BNA)
  modified_base (2)..(2): bicyclic nucleic acid (BNA)
  modified_base (5)..(5): 5-methyl modified nucleotide
  modified_base (6)..(6): 5-methyl modified nucleotide
  modified_base (14)..(14): 5-methyl modified nucleotide
  modified_base (15)..(15): 5-methyl modified nucleotide
  modified_base (17)..(17): 5-methyl modified nucleotide
  modified_base (18)..(18): bicyclic nucleic acid (BNA)
  modified_base (19)..(19): bicyclic nucleic acid (BNA)
gtuuccuuaguaaccacag

SEQ ID NO: 20996 - DNA, 17 bp, Artificial Sequence
  source: /note="Description of Artificial Sequence: Synthetic oligonucleotide"
  source: /note="Description of Combined DNA/RNA Molecule: Synthetic oligonucleotide"
  source: /note="DNA/RNA"
  modified_base (1)..(1): bicyclic nucleic acid (BNA)
  modified_base (2)..(2): bicyclic nucleic acid (BNA)
  modified_base (5)..(5): 5-methyl modified nucleotide
  modified_base (6)..(6): 5-methyl modified nucleotide
  modified_base (14)..(14): 5-methyl modified nucleotide
  modified_base (15)..(15): 5-methyl modified nucleotide
  modified_base (16)..(16): bicyclic nucleic acid (BNA)
  modified_base (17)..(17): 5-methyl bicyclic nucleic acid
gtuuccuuaguaaccac

SEQ ID NO: 20997 - DNA, 20 bp, Artificial Sequence
  source: /note="Description of Artificial Sequence: Synthetic oligonucleotide"
  source: /note="Description of Combined DNA/RNA Molecule: Synthetic oligonucleotide"
  source: /note="DNA/RNA"
  source: /note="5' tri-ethylene glycol (TEG)"
  modified_base (1)..(1): bicyclic nucleic acid (BNA)
  modified_base (2)..(2): 5-methyl bicyclic nucleic acid
  modified_base (14)..(14): 5-methyl modified nucleotide
  modified_base (19)..(19): 5-methyl bicyclic nucleic acid
  modified_base (20)..(20): bicyclic nucleic acid (BNA)
tcaaggaagauggcauuuct

SEQ ID NO: 20998 - DNA, 22 bp, Artificial Sequence
  source: /note="Description of Artificial Sequence: Synthetic oligonucleotide"
  source: /note="Description of Combined DNA/RNA Molecule: Synthetic oligonucleotide"
  source: /note="DNA/RNA"
  source: /note="5' tri-ethylene glycol (TEG)"
  modified_base (1)..(1): bicyclic nucleic acid (BNA)
  modified_base (2)..(2): 5-methyl bicyclic nucleic acid
  modified_base (14)..(14): 5-methyl modified nucleotide
  modified_base (19)..(19): 5-methyl modified nucleotide
  modified_base (21)..(21): bicyclic nucleic acid (BNA)
  modified_base (22)..(22): bicyclic nucleic acid (BNA)
tcaaggaagauggcauuucuag

SEQ ID NO: 20999 - RNA, 18 nt, Artificial Sequence
  source: /note="Description of Artificial Sequence: Synthetic oligonucleotide"
  source: /note="RNA"
  source: /note="5' tri-ethylene glycol (TEG)"
  modified_base (1)..(1): bicyclic nucleic acid (BNA)
  modified_base (2)..(2): bicyclic nucleic acid (BNA)
  modified_base (9)..(9): 5-methyl modified nucleotide
  modified_base (13)..(13): 5-methyl modified nucleotide
  modified_base (14)..(14): 5-methyl modified nucleotide
  modified_base (17)..(17): bicyclic nucleic acid (BNA)
  modified_base (18)..(18): 5-methyl bicyclic nucleic acid
gguaaguucuguccaagc

SEQ ID NO: 21000 - DNA, 18 bp, Artificial Sequence
  source: /note="Description of Artificial Sequence: Synthetic oligonucleotide"
  source: /note="Description of Combined DNA/RNA Molecule: Synthetic oligonucleotide"
  source: /note="DNA/RNA"
  source: /note="5' tri-ethylene glycol (TEG)"
  modified_base (1)..(1): bicyclic nucleic acid (BNA)
  modified_base (2)..(2): bicyclic nucleic acid (BNA)
  modified_base (8)..(8): 5-methyl modified nucleotide
  modified_base (12)..(12): 5-methyl modified nucleotide
  modified_base (13)..(13): 5-methyl modified nucleotide
  modified_base (17)..(17): 5-methyl bicyclic nucleic acid
  modified_base (18)..(18): 5-methyl bicyclic nucleic acid
gtaaguucuguccaagcc

SEQ ID NO: 21001 - RNA, 18 nt, Artificial Sequence
  source: /note="Description of Artificial Sequence: Synthetic oligonucleotide"
  source: /note="RNA"
  source: /note="5' tri-ethylene glycol (TEG)"
  modified_base (1)..(1): bicyclic nucleic acid (BNA)
  modified_base (2)..(2): bicyclic nucleic acid (BNA)
  modified_base (4)..(4): 5-methyl modified nucleotide
  modified_base (13)..(13): 5-methyl modified nucleotide
  modified_base (17)..(17): 5-methyl bicyclic nucleic acid
  modified_base (18)..(18): 5-methyl bicyclic nucleic acid
agucgguaaguucugucc

SEQ ID NO: 21002 - DNA, 18 bp, Artificial Sequence
  source: /note="Description of Artificial Sequence: Synthetic oligonucleotide"
  source: /note="Description of Combined DNA/RNA Molecule: Synthetic oligonucleotide"
  source: /note="DNA/RNA"
  source: /note="5' tri-ethylene glycol (TEG)"
  modified_base (1)..(1): 5-methyl bicyclic nucleic acid
  modified_base (2)..(2): bicyclic nucleic acid (BNA)
  modified_base (5)..(5): 5-methyl modified nucleotide
  modified_base (6)..(6): 5-methyl modified nucleotide
  modified_base (10)..(10): 5-methyl modified nucleotide
  modified_base (11)..(11): 5-methyl modified nucleotide
  modified_base (12)..(12): 5-methyl modified nucleotide
  modified_base (17)..(17): bicyclic nucleic acid (BNA)
  modified_base (18)..(18): bicyclic nucleic acid (BNA)
ctguccaagcccgguuga

SEQ ID NO: 21003 - DNA, 15 bp, Artificial Sequence
  source: /note="Description of Artificial Sequence: Synthetic oligonucleotide"
  source: /note="Description of Combined DNA/RNA Molecule: Synthetic oligonucleotide"
  source: /note="DNA/RNA"
  source: /note="5' tri-ethylene glycol (TEG)"
  modified_base (1)..(1): bicyclic nucleic acid (BNA)
  modified_base (2)..(2): bicyclic nucleic acid (BNA)
  modified_base (7)..(7): 5-methyl modified nucleotide
  modified_base (11)..(11): 5-methyl modified nucleotide
  modified_base (12)..(12): 5-methyl modified nucleotide
  modified_base (14)..(14): bicyclic nucleic acid (BNA)
  modified_base (15)..(15): bicyclic nucleic acid (BNA)
taaguucuguccaag

SEQ ID NO: 21004 - DNA, 20 bp, Artificial Sequence
  source: /note="Description of Artificial Sequence: Synthetic oligonucleotide"
  source: /note="Description of Combined DNA/RNA Molecule: Synthetic oligonucleotide"
  source: /note="DNA/RNA"
  source: /note="5' tri-ethylene glycol (TEG)"
  modified_base (1)..(1): bicyclic nucleic acid (BNA)
  modified_base (2)..(2): bicyclic nucleic acid (BNA)
  modified_base (3)..(3): 5-methyl modified nucleotide
  modified_base (7)..(7): 5-methyl modified nucleotide
  modified_base (8)..(8): 5-methyl modified nucleotide
  modified_base (12)..(12): 5-methyl modified nucleotide
  modified_base (13)..(13): 5-methyl modified nucleotide
  modified_base (14)..(14): 5-methyl modified nucleotide
  modified_base (19)..(19): bicyclic nucleic acid (BNA)
  modified_base (20)..(20): bicyclic nucleic acid (BNA)
ttcuguccaagcccgguuga

SEQ ID NO: 21005 - DNA, 19 bp, Artificial Sequence
  source: /note="Description of Artificial Sequence: Synthetic oligonucleotide"
  source: /note="Description of Combined DNA/RNA Molecule: Synthetic oligonucleotide"
  source: /note="DNA/RNA"
  source: /note="5' tri-ethylene glycol (TEG)"
  modified_base (1)..(1): bicyclic nucleic acid (BNA)
  modified_base (2)..(2): bicyclic nucleic acid (BNA)
  modified_base (3)..(3): 5-methyl modified nucleotide
  modified_base (7)..(7): 5-methyl modified nucleotide
  modified_base (8)..(8): 5-methyl modified nucleotide
  modified_base (12)..(12): 5-methyl modified nucleotide
  modified_base (13)..(13): 5-methyl modified nucleotide
  modified_base (14)..(14): 5-methyl modified nucleotide
  modified_base (18)..(18): bicyclic nucleic acid (BNA)
  modified_base (19)..(19): bicyclic nucleic acid (BNA)
ttcuguccaagcccggutg

SEQ ID NO: 21006 - DNA, 18 bp, Artificial Sequence
  source: /note="Description of Artificial Sequence: Synthetic oligonucleotide"
  source: /note="Description of Combined DNA/RNA Molecule: Synthetic oligonucleotide"
  source: /note="DNA/RNA"
  source: /note="5' tri-ethylene glycol (TEG)"
  modified_base (1)..(1): bicyclic nucleic acid (BNA)
  modified_base (2)..(2): bicyclic nucleic acid (BNA)
  modified_base (3)..(3): 5-methyl modified nucleotide
  modified_base (7)..(7): 5-methyl modified nucleotide
  modified_base (8)..(8): 5-methyl modified nucleotide
  modified_base (12)..(12): 5-methyl modified nucleotide
  modified_base (13)..(13): 5-methyl modified nucleotide
  modified_base (14)..(14): 5-methyl modified nucleotide
  modified_base (17)..(17): bicyclic nucleic acid (BNA)
  modified_base (18)..(18): bicyclic nucleic acid (BNA)
ttcuguccaagcccggtt

SEQ ID NO: 21007 - DNA, 17 bp, Artificial Sequence
  source: /note="Description of Artificial Sequence: Synthetic oligonucleotide"
  source: /note="Description of Combined DNA/RNA Molecule: Synthetic oligonucleotide"
  source: /note="DNA/RNA"
  source: /note="5' tri-ethylene glycol (TEG)"
  modified_base (1)..(1): bicyclic nucleic acid (BNA)
  modified_base (2)..(2): bicyclic nucleic acid (BNA)
  modified_base (3)..(3): 5-methyl modified nucleotide
  modified_base (7)..(7): 5-methyl modified nucleotide
  modified_base (8)..(8): 5-methyl modified nucleotide
  modified_base (12)..(12): 5-methyl modified nucleotide
  modified_base (13)..(13): 5-methyl modified nucleotide
  modified_base (14)..(14): 5-methyl modified nucleotide
  modified_base (16)..(16): bicyclic nucleic acid (BNA)
  modified_base (17)..(17): bicyclic nucleic acid (BNA)
ttcuguccaagcccggt

SEQ ID NO: 21008 - DNA, 16 bp, Artificial Sequence
  source: /note="Description of Artificial Sequence: Synthetic oligonucleotide"
  source: /note="Description of Combined DNA/RNA Molecule: Synthetic oligonucleotide"
  source: /note="DNA/RNA"
  source: /note="5' tri-ethylene glycol (TEG)"
  modified_base (1)..(1): bicyclic nucleic acid (BNA)
  modified_base (2)..(2): bicyclic nucleic acid (BNA)
  modified_base (3)..(3): 5-methyl modified nucleotide
  modified_base (7)..(7): 5-methyl modified nucleotide
  modified_base (8)..(8): 5-methyl modified nucleotide
  modified_base (12)..(12): 5-methyl modified nucleotide
  modified_base (13)..(13): 5-methyl modified nucleotide
  modified_base (14)..(14): 5-methyl modified nucleotide
  modified_base (15)..(15): bicyclic nucleic acid (BNA)
  modified_base (16)..(16): bicyclic nucleic acid (BNA)
ttcuguccaagcccgg

SEQ ID NO: 21009 - DNA, 15 bp, Artificial Sequence
  source: /note="Description of Artificial Sequence: Synthetic oligonucleotide"
  source: /note="Description of Combined DNA/RNA Molecule: Synthetic oligonucleotide"
  source: /note="DNA/RNA"
  source: /note="5' tri-ethylene glycol (TEG)"
  modified_base (1)..(1): bicyclic nucleic acid (BNA)
  modified_base (2)..(2): bicyclic nucleic acid (BNA)
  modified_base (3)..(3): 5-methyl modified nucleotide
  modified_base (7)..(7): 5-methyl modified nucleotide
  modified_base (8)..(8): 5-methyl modified nucleotide
  modified_base (12)..(12): 5-methyl modified nucleotide
  modified_base (13)..(13): 5-methyl modified nucleotide
  modified_base (14)..(14): 5-methyl bicyclic nucleic acid
  modified_base (15)..(15): bicyclic nucleic acid (BNA)
ttcuguccaagcccg

SEQ ID NO: 21010 - DNA, 14 bp, Artificial Sequence
  source: /note="Description of Artificial Sequence: Synthetic oligonucleotide"
  source: /note="Description of Combined DNA/RNA Molecule: Synthetic oligonucleotide"
  source: /note="DNA/RNA"
  source: /note="5' tri-ethylene glycol (TEG)"
  modified_base (1)..(1): bicyclic nucleic acid (BNA)
  modified_base (2)..(2): bicyclic nucleic acid (BNA)
  modified_base (3)..(3): 5-methyl modified nucleotide
  modified_base (7)..(7): 5-methyl modified nucleotide
  modified_base (8)..(8): 5-methyl modified nucleotide
  modified_base (12)..(12): 5-methyl modified nucleotide
  modified_base (13)..(13): 5-methyl bicyclic nucleic acid
  modified_base (14)..(14): 5-methyl bicyclic nucleic acid
ttcuguccaagccc

SEQ ID NO: 21011 - DNA, 13 bp, Artificial Sequence
  source: /note="Description of Artificial Sequence: Synthetic oligonucleotide"
  source: /note="Description of Combined DNA/RNA Molecule: Synthetic oligonucleotide"
  source: /note="DNA/RNA"
  source: /note="5' tri-ethylene glycol (TEG)"
  modified_base (1)..(1): bicyclic nucleic acid (BNA)
  modified_base (2)..(2): bicyclic nucleic acid (BNA)
  modified_base (3)..(3): 5-methyl modified nucleotide
  modified_base (7)..(7): 5-methyl modified nucleotide
  modified_base (8)..(8): 5-methyl modified nucleotide
  modified_base (12)..(12): 5-methyl bicyclic nucleic acid
  modified_base (13)..(13): 5-methyl bicyclic nucleic acid
ttcuguccaagcc

SEQ ID NO: 21012 - DNA, 12 bp, Artificial Sequence
  source: /note="Description of Artificial Sequence: Synthetic oligonucleotide"
  source: /note="Description of Combined DNA/RNA Molecule: Synthetic oligonucleotide"
  source: /note="DNA/RNA"
  source: /note="5' tri-ethylene glycol (TEG)"
  modified_base (1)..(1): bicyclic nucleic acid (BNA)
  modified_base (2)..(2): bicyclic nucleic acid (BNA)
  modified_base (3)..(3): 5-methyl modified nucleotide
  modified_base (7)..(7): 5-methyl modified nucleotide
  modified_base (8)..(8): 5-methyl modified nucleotide
  modified_base (11)..(11): bicyclic nucleic acid (BNA)
  modified_base (12)..(12): 5-methyl bicyclic nucleic acid
ttcuguccaagc

SEQ ID NO: 21013 - DNA, 11 bp, Artificial Sequence
  source: /note="Description of Artificial Sequence: Synthetic oligonucleotide"
  source: /note="Description of Combined DNA/RNA Molecule: Synthetic oligonucleotide"
  source: /note="DNA/RNA"
  source: /note="5' tri-ethylene glycol (TEG)"
  modified_base (1)..(1): bicyclic nucleic acid (BNA)
  modified_base (2)..(2): bicyclic nucleic acid (BNA)
  modified_base (3)..(3): 5-methyl modified nucleotide
  modified_base (7)..(7): 5-methyl modified nucleotide
  modified_base (8)..(8): 5-methyl modified nucleotide
  modified_base (10)..(10): bicyclic nucleic acid (BNA)
  modified_base (11)..(11): bicyclic nucleic acid (BNA)
ttcuguccaag

SEQ ID NO: 21014 - DNA, 10 bp, Artificial Sequence
  source: /note="Description of Artificial Sequence: Synthetic oligonucleotide"
  source: /note="Description of Combined DNA/RNA Molecule: Synthetic oligonucleotide"
  source: /note="DNA/RNA"
  source: /note="5' tri-ethylene glycol (TEG)"
  modified_base (1)..(1): bicyclic nucleic acid (BNA)
  modified_base (2)..(2): bicyclic nucleic acid (BNA)
  modified_base (3)..(3): 5-methyl modified nucleotide
  modified_base (7)..(7): 5-methyl modified nucleotide
  modified_base (8)..(8): 5-methyl modified nucleotide
  modified_base (9)..(9): bicyclic nucleic acid (BNA)
  modified_base (10)..(10): bicyclic nucleic acid (BNA)
ttcuguccaa

SEQ ID NO: 21015 - DNA, 9 bp, Artificial Sequence
  source: /note="Description of Artificial Sequence: Synthetic oligonucleotide"
  source: /note="Description of Combined DNA/RNA Molecule: Synthetic oligonucleotide"
  source: /note="DNA/RNA"
  source: /note="5' tri-ethylene glycol (TEG)"
  modified_base (1)..(1): bicyclic nucleic acid (BNA)
  modified_base (2)..(2): bicyclic nucleic acid (BNA)
  modified_base (3)..(3): 5-methyl modified nucleotide
  modified_base (7)..(7): 5-methyl modified nucleotide
  modified_base (8)..(8): 5-methyl bicyclic nucleic acid
  modified_base (9)..(9): bicyclic nucleic acid (BNA)
ttcugucca

SEQ ID NO: 21016 - DNA, 8 bp, Artificial Sequence
  source: /note="Description of Artificial Sequence: Synthetic oligonucleotide"
  source: /note="Description of Combined DNA/RNA Molecule: Synthetic oligonucleotide"
  source: /note="DNA/RNA"
  source: /note="5' tri-ethylene glycol (TEG)"
  modified_base (1)..(1): bicyclic nucleic acid (BNA)
  modified_base (2)..(2): bicyclic nucleic acid (BNA)
  modified_base (3)..(3): 5-methyl modified nucleotide
  modified_base (7)..(7): 5-methyl bicyclic nucleic acid
  modified_base (8)..(8): 5-methyl bicyclic nucleic acid
ttcugucc

SEQ ID NO: 21017 - DNA, 19 bp, Artificial Sequence
  source: /note="Description of Artificial Sequence: Synthetic oligonucleotide"
  source: /note="Description of Combined DNA/RNA Molecule: Synthetic oligonucleotide"
  source: /note="DNA/RNA"
  source: /note="5' tri-ethylene glycol (TEG)"
  modified_base (1)..(1): bicyclic nucleic acid (BNA)
  modified_base (2)..(2): 5-methyl bicyclic nucleic acid
  modified_base (6)..(6): 5-methyl modified nucleotide
  modified_base (7)..(7): 5-methyl modified nucleotide
  modified_base (11)..(11): 5-methyl modified nucleotide
  modified_base (12)..(12): 5-methyl modified nucleotide
  modified_base (13)..(13): 5-methyl modified nucleotide
  modified_base (18)..(18): bicyclic nucleic acid (BNA)
  modified_base (19)..(19): bicyclic nucleic acid (BNA)
tcuguccaagcccgguuga

SEQ ID NO: 21018 - DNA, 18 bp, Artificial Sequence
  source: /note="Description of Artificial Sequence: Synthetic oligonucleotide"
  source: /note="Description of Combined DNA/RNA Molecule: Synthetic oligonucleotide"
  source: /note="DNA/RNA"
  source: /note="5' tri-ethylene glycol (TEG)"
  modified_base (1)..(1): bicyclic nucleic acid (BNA)
  modified_base (2)..(2): 5-methyl bicyclic nucleic acid
  modified_base (6)..(6): 5-methyl modified nucleotide
  modified_base (7)..(7): 5-methyl modified nucleotide
  modified_base (11)..(11): 5-methyl modified nucleotide
  modified_base (12)..(12): 5-methyl modified nucleotide
  modified_base (13)..(13): 5-methyl modified nucleotide
  modified_base (17)..(17): bicyclic nucleic acid (BNA)
  modified_base (18)..(18): bicyclic nucleic acid (BNA)
tcuguccaagcccggutg

SEQ ID NO: 21019 - DNA, 17 bp, Artificial Sequence
  source: /note="Description of Artificial Sequence: Synthetic oligonucleotide"
  source: /note="Description of Combined DNA/RNA Molecule: Synthetic oligonucleotide"
  source: /note="DNA/RNA"
  source: /note="5' tri-ethylene glycol (TEG)"
  modified_base (1)..(1): bicyclic nucleic acid (BNA)
  modified_base (2)..(2): 5-methyl bicyclic nucleic acid
  modified_base (6)..(6): 5-methyl modified nucleotide
  modified_base (7)..(7): 5-methyl modified nucleotide
  modified_base (11)..(11): 5-methyl modified nucleotide
  modified_base (12)..(12): 5-methyl modified nucleotide
  modified_base (13)..(13): 5-methyl modified nucleotide
  modified_base (16)..(16): bicyclic nucleic acid (BNA)
  modified_base (17)..(17): bicyclic nucleic acid (BNA)
tcuguccaagcccggtt

SEQ ID NO: 21020 - DNA, 16 bp, Artificial Sequence
  source: /note="Description of Artificial Sequence: Synthetic oligonucleotide"
  source: /note="Description of Combined DNA/RNA Molecule: Synthetic oligonucleotide"
  source: /note="DNA/RNA"
  source: /note="5' tri-ethylene glycol (TEG)"
  modified_base (1)..(1): bicyclic nucleic acid (BNA)
  modified_base (2)..(2): 5-methyl bicyclic nucleic acid
  modified_base (6)..(6): 5-methyl modified nucleotide
  modified_base (7)..(7): 5-methyl modified nucleotide
  modified_base (11)..(11): 5-methyl modified nucleotide
  modified_base (12)..(12): 5-methyl modified nucleotide
  modified_base (13)..(13): 5-methyl modified nucleotide
  modified_base (15)..(15): bicyclic nucleic acid (BNA)
  modified_base (16)..(16): bicyclic nucleic acid (BNA)
tcuguccaagcccggt

SEQ ID NO: 21021 - DNA, 15 bp, Artificial Sequence
  source: /note="Description of Artificial Sequence: Synthetic oligonucleotide"
  source: /note="Description of Combined DNA/RNA Molecule: Synthetic oligonucleotide"
  source: /note="DNA/RNA"
  source: /note="5' tri-ethylene glycol (TEG)"
  modified_base (1)..(1): bicyclic nucleic acid (BNA)
  modified_base (2)..(2): 5-methyl bicyclic nucleic acid
  modified_base (6)..(6): 5-methyl modified nucleotide
  modified_base (7)..(7): 5-methyl modified nucleotide
  modified_base (11)..(11): 5-methyl modified nucleotide
  modified_base (12)..(12): 5-methyl modified nucleotide
  modified_base (13)..(13): 5-methyl modified nucleotide
  modified_base (14)..(14): bicyclic nucleic acid (BNA)
  modified_base (15)..(15): bicyclic nucleic acid (BNA)
tcuguccaagcccgg

SEQ ID NO: 21022 - DNA, 14 bp, Artificial Sequence
  source: /note="Description of Artificial Sequence: Synthetic oligonucleotide"
  source: /note="Description of Combined DNA/RNA Molecule: Synthetic oligonucleotide"
  source: /note="DNA/RNA"
  source: /note="5' tri-ethylene glycol (TEG)"
  modified_base (1)..(1): bicyclic nucleic acid (BNA)
  modified_base (2)..(2): 5-methyl bicyclic nucleic acid
  modified_base (6)..(6): 5-methyl modified nucleotide
  modified_base (7)..(7): 5-methyl modified nucleotide
  modified_base (11)..(11): 5-methyl modified nucleotide
  modified_base (12)..(12): 5-methyl modified nucleotide
  modified_base (13)..(13): 5-methyl bicyclic nucleic acid
  modified_base (14)..(14): bicyclic nucleic acid (BNA)
tcuguccaagcccg

SEQ ID NO: 21023 - DNA, 13 bp, Artificial Sequence
  source: /note="Description of Artificial Sequence: Synthetic oligonucleotide"
  source: /note="Description of Combined DNA/RNA Molecule: Synthetic oligonucleotide"
  source: /note="DNA/RNA"
  source: /note="5' tri-ethylene glycol (TEG)"
  modified_base (1)..(1): bicyclic nucleic acid (BNA)
  modified_base (2)..(2): 5-methyl bicyclic nucleic acid
  modified_base (6)..(6): 5-methyl modified nucleotide
  modified_base (7)..(7): 5-methyl modified nucleotide
  modified_base (11)..(11): 5-methyl modified nucleotide
  modified_base (12)..(12): 5-methyl bicyclic nucleic acid
  modified_base (13)..(13): 5-methyl bicyclic nucleic acid
tcuguccaagccc

SEQ ID NO: 21024 - DNA, 12 bp, Artificial Sequence
  source: /note="Description of Artificial Sequence: Synthetic oligonucleotide"
  source: /note="Description of Combined DNA/RNA Molecule: Synthetic oligonucleotide"
  source: /note="DNA/RNA"
  source: /note="5' tri-ethylene glycol (TEG)"
  modified_base (1)..(1): bicyclic nucleic acid (BNA)
  modified_base (2)..(2): 5-methyl bicyclic nucleic acid
  modified_base (6)..(6): 5-methyl modified nucleotide
  modified_base (7)..(7): 5-methyl modified nucleotide
  modified_base (11)..(11): 5-methyl bicyclic nucleic acid
  modified_base (12)..(12): 5-methyl bicyclic nucleic acid
tcuguccaagcc

SEQ ID NO: 21025 - DNA, 11 bp, Artificial Sequence
  source: /note="Description of Artificial Sequence: Synthetic oligonucleotide"
  source: /note="Description of Combined DNA/RNA Molecule: Synthetic oligonucleotide"
  source: /note="DNA/RNA"
  source: /note="5' tri-ethylene glycol (TEG)"
  modified_base (1)..(1): bicyclic nucleic acid (BNA)
  modified_base (2)..(2): 5-methyl bicyclic nucleic acid
  modified_base (6)..(6): 5-methyl modified nucleotide
  modified_base (7)..(7): 5-methyl modified nucleotide
  modified_base (10)..(10): bicyclic nucleic acid (BNA)
  modified_base (11)..(11): 5-methyl bicyclic nucleic acid
tcuguccaagc

SEQ ID NO: 21026 - DNA, 10 bp, Artificial Sequence
  source: /note="Description of Artificial Sequence: Synthetic oligonucleotide"
  source: /note="Description of Combined DNA/RNA Molecule: Synthetic oligonucleotide"
  source: /note="DNA/RNA"
  source: /note="5' tri-ethylene glycol (TEG)"
  modified_base (1)..(1): bicyclic nucleic acid (BNA)
  modified_base (2)..(2): 5-methyl bicyclic nucleic acid
  modified_base (6)..(6): 5-methyl modified nucleotide
  modified_base (7)..(7): 5-methyl modified nucleotide
  modified_base (9)..(9): bicyclic nucleic acid (BNA)
  modified_base (10)..(10): bicyclic nucleic acid (BNA)
tcuguccaag

SEQ ID NO: 21027 - DNA, 9 bp, Artificial Sequence
  source: /note="Description of Artificial Sequence: Synthetic oligonucleotide"
  source: /note="Description of Combined DNA/RNA Molecule: Synthetic oligonucleotide"
  source: /note="DNA/RNA"
  source: /note="5' tri-ethylene glycol (TEG)"
  modified_base (1)..(1): bicyclic nucleic acid (BNA)
  modified_base (2)..(2): 5-methyl bicyclic nucleic acid
  modified_base (6)..(6): 5-methyl modified nucleotide
  modified_base (7)..(7): 5-methyl modified nucleotide
  modified_base (8)..(8): bicyclic nucleic acid (BNA)
  modified_base (9)..(9): bicyclic nucleic acid (BNA)
tcuguccaa

SEQ ID NO: 21028 - DNA, 8 bp, Artificial Sequence
  source: /note="Description of Artificial Sequence: Synthetic oligonucleotide"
  source: /note="Description of Combined DNA/RNA Molecule: Synthetic oligonucleotide"
  source: /note="DNA/RNA"
  source: /note="5' tri-ethylene glycol (TEG)"
  modified_base (1)..(1): bicyclic nucleic acid (BNA)
  modified_base (2)..(2): 5-methyl bicyclic nucleic acid
  modified_base (6)..(6): 5-methyl modified nucleotide
  modified_base (7)..(7): 5-methyl bicyclic nucleic acid
  modified_base (8)..(8): bicyclic nucleic acid (BNA)
tcugucca

SEQ ID NO: 21029 - DNA, 17 bp, Artificial Sequence
  source: /note="Description of Artificial Sequence: Synthetic oligonucleotide"
  source: /note="Description of Combined DNA/RNA Molecule: Synthetic oligonucleotide"
  source: /note="DNA/RNA"
  source: /note="5' tri-ethylene glycol (TEG)"
  modified_base (1)..(1): 5-methyl bicyclic nucleic acid
  modified_base (2)..(2): bicyclic nucleic acid (BNA)
  modified_base (5)..(5): 5-methyl modified nucleotide
  modified_base (6)..(6): 5-methyl modified nucleotide
  modified_base (10)..(10): 5-methyl modified nucleotide
  modified_base (11)..(11): 5-methyl modified nucleotide
  modified_base (12)..(12): 5-methyl modified nucleotide
  modified_base (16)..(16): bicyclic nucleic acid (BNA)
  modified_base (17)..(17): bicyclic nucleic acid (BNA)
ctguccaagcccggutg

SEQ ID NO: 21030 - DNA, 16 bp, Artificial Sequence
  source: /note="Description of Artificial Sequence: Synthetic oligonucleotide"
  source: /note="Description of Combined DNA/RNA Molecule: Synthetic oligonucleotide"
  source: /note="DNA/RNA"
  source: /note="5' tri-ethylene glycol (TEG)"
  modified_base (1)..(1): 5-methyl bicyclic nucleic acid
  modified_base (2)..(2): bicyclic nucleic acid (BNA)
  modified_base (5)..(5): 5-methyl modified nucleotide
  modified_base (6)..(6): 5-methyl modified nucleotide
  modified_base (10)..(10): 5-methyl modified nucleotide
  modified_base (11)..(11): 5-methyl modified nucleotide
  modified_base (12)..(12): 5-methyl modified nucleotide
  modified_base (15)..(15): bicyclic nucleic acid (BNA)
  modified_base (16)..(16): bicyclic nucleic acid (BNA)
ctguccaagcccggtt

SEQ ID NO: 21031 - DNA, 15 bp, Artificial Sequence
  source: /note="Description of Artificial Sequence: Synthetic oligonucleotide"
  source: /note="Description of Combined DNA/RNA Molecule: Synthetic oligonucleotide"
  source: /note="DNA/RNA"
  source: /note="5' tri-ethylene glycol (TEG)"
  modified_base (1)..(1): 5-methyl bicyclic nucleic acid
  modified_base (2)..(2): bicyclic nucleic acid (BNA)
  modified_base (5)..(5): 5-methyl modified nucleotide
  modified_base (6)..(6): 5-methyl modified nucleotide
  modified_base (10)..(10): 5-methyl modified nucleotide
  modified_base (11)..(11): 5-methyl modified nucleotide
  modified_base (12)..(12): 5-methyl modified nucleotide
  modified_base (14)..(14): bicyclic nucleic acid (BNA)
  modified_base (15)..(15): bicyclic nucleic acid (BNA)
ctguccaagcccggt

SEQ ID NO: 21032 - DNA, 14 bp, Artificial Sequence
  source: /note="Description of Artificial Sequence: Synthetic oligonucleotide"
  source: /note="Description of Combined DNA/RNA Molecule: Synthetic oligonucleotide"
  source: /note="DNA/RNA"
  source: /note="5' tri-ethylene glycol (TEG)"
  modified_base (1)..(1): 5-methyl bicyclic nucleic acid
  modified_base (2)..(2): bicyclic nucleic acid (BNA)
  modified_base (5)..(5): 5-methyl modified nucleotide
  modified_base (6)..(6): 5-methyl modified nucleotide
  modified_base (10)..(10): 5-methyl modified nucleotide
  modified_base (11)..(11): 5-methyl modified nucleotide
  modified_base (12)..(12): 5-methyl modified nucleotide
  modified_base (13)..(13): bicyclic nucleic acid (BNA)
  modified_base (14)..(14): bicyclic nucleic acid (BNA)
ctguccaagcccgg

SEQ ID NO: 21033 - DNA, 13 bp, Artificial Sequence
  source: /note="Description of Artificial Sequence: Synthetic oligonucleotide"
  source: /note="Description of Combined DNA/RNA Molecule: Synthetic oligonucleotide"
  source: /note="DNA/RNA"
  source: /note="5' tri-ethylene glycol (TEG)"
  modified_base (1)..(1): 5-methyl bicyclic nucleic acid
  modified_base (2)..(2): bicyclic nucleic acid (BNA)
  modified_base (5)..(5): 5-methyl modified nucleotide
  modified_base (6)..(6): 5-methyl modified nucleotide
  modified_base (10)..(10): 5-methyl modified nucleotide
  modified_base (11)..(11): 5-methyl modified nucleotide
  modified_base (12)..(12): 5-methyl bicyclic nucleic acid
  modified_base (13)..(13): bicyclic nucleic acid (BNA)
ctguccaagcccg

SEQ ID NO: 21034 - DNA, 12 bp, Artificial Sequence
  source: /note="Description of Artificial Sequence: Synthetic oligonucleotide"
  source: /note="Description of Combined DNA/RNA Molecule: Synthetic oligonucleotide"
  source: /note="DNA/RNA"
  source: /note="5' tri-ethylene glycol (TEG)"
  modified_base (1)..(1): 5-methyl bicyclic nucleic acid
  modified_base (2)..(2): bicyclic nucleic acid (BNA)
  modified_base (5)..(5): 5-methyl modified nucleotide
  modified_base (6)..(6): 5-methyl modified nucleotide
  modified_base (10)..(10): 5-methyl modified nucleotide
  modified_base (11)..(11): 5-methyl bicyclic nucleic acid
  modified_base (12)..(12): 5-methyl bicyclic nucleic acid
ctguccaagccc

SEQ ID NO: 21035 - DNA, 11 bp, Artificial Sequence
  source: /note="Description of Artificial Sequence: Synthetic oligonucleotide"
  source: /note="Description of Combined DNA/RNA Molecule: Synthetic oligonucleotide"
  source: /note="DNA/RNA"
  source: /note="5' tri-ethylene glycol (TEG)"
  modified_base (1)..(1): 5-methyl bicyclic nucleic acid
  modified_base (2)..(2): bicyclic nucleic acid (BNA)
  modified_base (5)..(5): 5-methyl modified nucleotide
  modified_base (6)..(6): 5-methyl modified nucleotide
  modified_base (10)..(10): 5-methyl bicyclic nucleic acid
  modified_base (11)..(11): 5-methyl bicyclic nucleic acid
ctguccaagcc

SEQ ID NO: 21036 - DNA, 10 bp, Artificial Sequence
  source: /note="Description of Artificial Sequence: Synthetic oligonucleotide"
  source: /note="Description of Combined DNA/RNA Molecule: Synthetic oligonucleotide"
  source: /note="DNA/RNA"
  source: /note="5' tri-ethylene glycol (TEG)"
  modified_base (1)..(1): 5-methyl bicyclic nucleic acid
  modified_base (2)..(2): bicyclic nucleic acid (BNA)
  modified_base (5)..(5): 5-methyl modified nucleotide
  modified_base (6)..(6): 5-methyl modified nucleotide
  modified_base (9)..(9): bicyclic nucleic acid (BNA)
  modified_base (10)..(10): 5-methyl bicyclic nucleic acid
ctguccaagc

SEQ ID NO: 21037 - DNA, 9 bp, Artificial Sequence
  source: /note="Description of Artificial Sequence: Synthetic oligonucleotide"
  source: /note="Description of Combined DNA/RNA Molecule: Synthetic oligonucleotide"
  source: /note="DNA/RNA"
  source: /note="5' tri-ethylene glycol (TEG)"
  modified_base (1)..(1): 5-methyl bicyclic nucleic acid
  modified_base (2)..(2): bicyclic nucleic acid (BNA)
  modified_base (5)..(5): 5-methyl modified nucleotide
  modified_base (6)..(6): 5-methyl modified nucleotide
  modified_base (8)..(8): bicyclic nucleic acid (BNA)
  modified_base (9)..(9): bicyclic nucleic acid (BNA)
ctguccaag

SEQ ID NO: 21038 - DNA, 8 bp, Artificial Sequence
  source: /note="Description of Artificial Sequence: Synthetic oligonucleotide"
  source: /note="Description of Combined DNA/RNA Molecule: Synthetic oligonucleotide"
  source: /note="DNA/RNA"
  source: /note="5' tri-ethylene glycol (TEG)"
  modified_base (1)..(1): 5-methyl bicyclic nucleic acid
  modified_base (2)..(2): bicyclic nucleic acid (BNA)
  modified_base (5)..(5): 5-methyl modified nucleotide
  modified_base (6)..(6): 5-methyl modified nucleotide
  modified_base (7)..(7): bicyclic nucleic acid (BNA)
  modified_base (8)..(8): bicyclic nucleic acid (BNA)
ctguccaa

SEQ ID NO: 21039 - DNA, 20 bp, Artificial Sequence
  source: /note="Description of Artificial Sequence: Synthetic oligonucleotide"
  source: /note="Description of Combined DNA/RNA Molecule: Synthetic oligonucleotide"
  source: /note="DNA/RNA"
  source: /note="5' tri-ethylene glycol (TEG)"
  modified_base (1)..(1): bicyclic nucleic acid (BNA)
  modified_base (2)..(2): bicyclic nucleic acid (BNA)
  modified_base (4)..(4): 5-methyl modified nucleotide
  modified_base (8)..(8): 5-methyl modified nucleotide
  modified_base (9)..(9): 5-methyl modified nucleotide
  modified_base (13)..(13): 5-methyl modified nucleotide
  modified_base (14)..(14): 5-methyl modified nucleotide
  modified_base (15)..(15): 5-methyl modified nucleotide
  modified_base (19)..(19): bicyclic nucleic acid (BNA)
  modified_base (20)..(20): bicyclic nucleic acid (BNA)
gtucuguccaagcccggutg

SEQ ID NO: 21040 - DNA, 19 bp, Artificial Sequence
  source: /note="Description of Artificial Sequence: Synthetic oligonucleotide"
  source: /note="Description of Combined DNA/RNA Molecule: Synthetic oligonucleotide"
  source: /note="DNA/RNA"
  source: /note="5' tri-ethylene glycol (TEG)"
  modified_base (1)..(1): bicyclic nucleic acid (BNA)
  modified_base (2)..(2): bicyclic nucleic acid (BNA)
  modified_base (4)..(4): 5-methyl modified nucleotide
  modified_base (8)..(8): 5-methyl modified nucleotide
  modified_base (9)..(9): 5-methyl modified nucleotide
  modified_base (13)..(13): 5-methyl modified nucleotide
  modified_base (14)..(14): 5-methyl modified nucleotide
  modified_base (15)..(15): 5-methyl modified nucleotide
  modified_base (18)..(18): bicyclic nucleic acid (BNA)
  modified_base (19)..(19): bicyclic nucleic acid (BNA)
gtucuguccaagcccggtt

SEQ ID NO: 21041 - DNA, 18 bp, Artificial Sequence
  source: /note="Description of Artificial Sequence: Synthetic oligonucleotide"
  source: /note="Description of Combined DNA/RNA Molecule: Synthetic oligonucleotide"
  source: /note="DNA/RNA"
  source: /note="5' tri-ethylene glycol (TEG)"
  modified_base (1)..(1): bicyclic nucleic acid (BNA)
  modified_base (2)..(2): bicyclic nucleic acid (BNA)
  modified_base (4)..(4): 5-methyl modified nucleotide
  modified_base (8)..(8): 5-methyl modified nucleotide
  modified_base (9)..(9): 5-methyl modified nucleotide
  modified_base (13)..(13): 5-methyl modified nucleotide
  modified_base (14)..(14): 5-methyl modified nucleotide
  modified_base (15)..(15): 5-methyl modified nucleotide
  modified_base (17)..(17): bicyclic nucleic acid (BNA)
  modified_base (18)..(18): bicyclic nucleic acid (BNA)
gtucuguccaagcccggt

SEQ ID NO: 21042 - DNA, 17 bp, Artificial Sequence
  source: /note="Description of Artificial Sequence: Synthetic oligonucleotide"
  source: /note="Description of Combined DNA/RNA Molecule: Synthetic oligonucleotide"
  source: /note="DNA/RNA"
  source: /note="5' tri-ethylene glycol (TEG)"
  modified_base (1)..(1): bicyclic nucleic acid (BNA)
  modified_base (2)..(2): bicyclic nucleic acid (BNA)
  modified_base (4)..(4): 5-methyl modified nucleotide
  modified_base (8)..(8): 5-methyl modified nucleotide
  modified_base (9)..(9): 5-methyl modified nucleotide
  modified_base (13)..(13): 5-methyl modified nucleotide
  modified_base (14)..(14): 5-methyl modified nucleotide
  modified_base (15)..(15): 5-methyl modified nucleotide
  modified_base (16)..(16): bicyclic nucleic acid (BNA)
  modified_base (17)..(17): bicyclic nucleic acid (BNA)
gtucuguccaagcccgg

SEQ ID NO: 21043 - DNA, 16 bp, Artificial Sequence
  source: /note="Description of Artificial Sequence: Synthetic oligonucleotide"
  source: /note="Description of Combined DNA/RNA Molecule: Synthetic oligonucleotide"
  source: /note="DNA/RNA"
  source: /note="5' tri-ethylene glycol (TEG)"
  modified_base (1)..(1): bicyclic nucleic acid (BNA)
  modified_base (2)..(2): bicyclic nucleic acid (BNA)
  modified_base (4)..(4): 5-methyl modified nucleotide
  modified_base (8)..(8): 5-methyl modified nucleotide
  modified_base (9)..(9): 5-methyl modified nucleotide
  modified_base (13)..(13): 5-methyl modified nucleotide
  modified_base (14)..(14): 5-methyl modified nucleotide
  modified_base (15)..(15): 5-methyl bicyclic nucleic acid
  modified_base (16)..(16): bicyclic nucleic acid (BNA)
gtucuguccaagcccg

SEQ ID NO: 21044 - DNA, 15 bp, Artificial Sequence
  source: /note="Description of Artificial Sequence: Synthetic oligonucleotide"
  source: /note="Description of Combined DNA/RNA Molecule: Synthetic oligonucleotide"
  source: /note="DNA/RNA"
  source: /note="5' tri-ethylene glycol (TEG)"
  modified_base (1)..(1): bicyclic nucleic acid (BNA)
  modified_base (2)..(2): bicyclic nucleic acid (BNA)
  modified_base (4)..(4): 5-methyl modified nucleotide
  modified_base (8)..(8): 5-methyl modified nucleotide
  modified_base (9)..(9): 5-methyl modified nucleotide
  modified_base (13)..(13): 5-methyl modified nucleotide
  modified_base (14)..(14): 5-methyl bicyclic nucleic acid
  modified_base (15)..(15): 5-methyl bicyclic nucleic acid
gtucuguccaagccc

SEQ ID NO: 21045 - DNA, 14 bp, Artificial Sequence
  source: /note="Description of Artificial Sequence: Synthetic oligonucleotide"
  source: /note="Description of Combined DNA/RNA Molecule: Synthetic oligonucleotide"
  source: /note="DNA/RNA"
  source: /note="5' tri-ethylene glycol (TEG)"
  modified_base (1)..(1): bicyclic nucleic acid (BNA)
  modified_base (2)..(2): bicyclic nucleic acid (BNA)
  modified_base (4)..(4): 5-methyl modified nucleotide
  modified_base (8)..(8): 5-methyl modified nucleotide
  modified_base (9)..(9): 5-methyl modified nucleotide
  modified_base (13)..(13): 5-methyl bicyclic nucleic acid
  modified_base (14)..(14): 5-methyl bicyclic nucleic acid
gtucuguccaagcc

SEQ ID NO: 21046 - DNA, 13 bp, Artificial Sequence
  source: /note="Description of Artificial Sequence: Synthetic oligonucleotide"
  source: /note="Description of Combined DNA/RNA Molecule: Synthetic oligonucleotide"
  source: /note="DNA/RNA"
  source: /note="5' tri-ethylene glycol (TEG)"
  modified_base (1)..(1): bicyclic nucleic acid (BNA)
  modified_base (2)..(2): bicyclic nucleic acid (BNA)
  modified_base (4)..(4): 5-methyl modified nucleotide
  modified_base (8)..(8): 5-methyl modified nucleotide
  modified_base (9)..(9): 5-methyl modified nucleotide
  modified_base (12)..(12): bicyclic nucleic acid (BNA)
  modified_base (13)..(13): 5-methyl bicyclic nucleic acid
gtucuguccaagc

SEQ ID NO: 21047 - DNA, 12 bp, Artificial Sequence
  source: /note="Description of Artificial Sequence: Synthetic oligonucleotide"
  source: /note="Description of Combined DNA/RNA Molecule: Synthetic oligonucleotide"
  source: /note="DNA/RNA"
  source: /note="5' tri-ethylene glycol (TEG)"
  modified_base (1)..(1): bicyclic nucleic acid (BNA)
  modified_base (2)..(2): bicyclic nucleic acid (BNA)
  modified_base (4)..(4): 5-methyl modified nucleotide
  modified_base (8)..(8): 5-methyl modified nucleotide
  modified_base (9)..(9): 5-methyl modified nucleotide
  modified_base (11)..(11): bicyclic nucleic acid (BNA)
  modified_base (12)..(12): bicyclic nucleic acid (BNA)
gtucuguccaag

SEQ ID NO: 21048 - DNA, 11 bp, Artificial Sequence
  source: /note="Description of Artificial Sequence: Synthetic oligonucleotide"
  source: /note="Description of Combined DNA/RNA Molecule: Synthetic oligonucleotide"
  source: /note="DNA/RNA"
  source: /note="5' tri-ethylene glycol (TEG)"
  modified_base (1)..(1): bicyclic nucleic acid (BNA)
  modified_base (2)..(2): bicyclic nucleic acid (BNA)
  modified_base (4)..(4): 5-methyl modified nucleotide
  modified_base (8)..(8): 5-methyl modified nucleotide
  modified_base (9)..(9): 5-methyl modified nucleotide
  modified_base (10)..(10): bicyclic nucleic acid (BNA)
  modified_base (11)..(11): bicyclic nucleic acid (BNA)
gtucuguccaa

SEQ ID NO: 21049 - DNA, 10 bp, Artificial Sequence
  source: /note="Description of Artificial Sequence: Synthetic oligonucleotide"
  source: /note="Description of Combined DNA/RNA Molecule: Synthetic oligonucleotide"
  source: /note="DNA/RNA"
  source: /note="5' tri-ethylene glycol (TEG)"
  modified_base (1)..(1): bicyclic nucleic acid (BNA)
  modified_base (2)..(2): bicyclic nucleic acid (BNA)
  modified_base (4)..(4): 5-methyl modified nucleotide
  modified_base (8)..(8): 5-methyl modified nucleotide
  modified_base (9)..(9): 5-methyl bicyclic nucleic acid
  modified_base (10)..(10): bicyclic nucleic acid (BNA)
gtucugucca

SEQ ID NO: 21050 - DNA, 9 bp, Artificial Sequence
  source: /note="Description of Artificial Sequence: Synthetic oligonucleotide"
  source: /note="Description of Combined DNA/RNA Molecule: Synthetic oligonucleotide"
  source: /note="DNA/RNA"
  source: /note="5' tri-ethylene glycol (TEG)"
  modified_base (1)..(1): bicyclic nucleic acid (BNA)
  modified_base (2)..(2): bicyclic nucleic acid (BNA)
  modified_base (4)..(4): 5-methyl modified nucleotide
  modified_base (8)..(8): 5-methyl bicyclic nucleic acid
  modified_base (9)..(9): 5-methyl bicyclic nucleic acid
gtucugucc

SEQ ID NO: 21051 - DNA, 8 bp, Artificial Sequence
  source: /note="Description of Artificial Sequence: Synthetic oligonucleotide"
  source: /note="Description of Combined DNA/RNA Molecule: Synthetic oligonucleotide"
  source: /note="DNA/RNA"
  source: /note="5' tri-ethylene glycol (TEG)"
  modified_base (1)..(1): bicyclic nucleic acid (BNA)
  modified_base (2)..(2): bicyclic nucleic acid (BNA)
  modified_base (4)..(4): 5-methyl modified nucleotide
  modified_base (7)..(7): bicyclic nucleic acid (BNA)
  modified_base (8)..(8): 5-methyl bicyclic nucleic acid
gtucugtc

SEQ ID NO: 21052 - DNA, 20 bp, Artificial Sequence
  source: /note="Description of Artificial Sequence: Synthetic oligonucleotide"
  source: /note="Description of Combined DNA/RNA Molecule: Synthetic oligonucleotide"
  source: /note="DNA/RNA"
  source: /note="5' tri-ethylene glycol (TEG)"
  modified_base (1)..(1): bicyclic nucleic acid (BNA)
  modified_base (2)..(2): bicyclic nucleic acid (BNA)
  modified_base (5)..(5): 5-methyl modified nucleotide
  modified_base (9)..(9): 5-methyl modified nucleotide
  modified_base (10)..(10): 5-methyl modified nucleotide
  modified_base (14)..(14): 5-methyl modified nucleotide
  modified_base (15)..(15): 5-methyl modified nucleotide
  modified_base (16)..(16): 5-methyl modified nucleotide
  modified_base (19)..(19): bicyclic nucleic acid (BNA)
  modified_base (20)..(20): bicyclic nucleic acid (BNA)
aguucuguccaagcccggtt

SEQ ID NO: 21053 - DNA, 19 bp, Artificial Sequence
  source: /note="Description of Artificial Sequence: Synthetic oligonucleotide"
  source: /note="Description of Combined DNA/RNA Molecule: Synthetic oligonucleotide"
  source: /note="DNA/RNA"
  source: /note="5' tri-ethylene glycol (TEG)"
  modified_base (1)..(1): bicyclic nucleic acid (BNA)
  modified_base (2)..(2): bicyclic nucleic acid (BNA)
  modified_base (5)..(5): 5-methyl modified nucleotide
  modified_base (9)..(9): 5-methyl modified nucleotide
  modified_base (10)..(10): 5-methyl modified nucleotide
  modified_base (14)..(14): 5-methyl modified nucleotide
  modified_base (15)..(15): 5-methyl modified nucleotide
  modified_base (16)..(16): 5-methyl modified nucleotide
  modified_base (18)..(18): bicyclic nucleic acid (BNA)
  modified_base (19)..(19): bicyclic nucleic acid (BNA)
aguucuguccaagcccggt

SEQ ID NO: 21054 - RNA, 18 nt, Artificial Sequence
  source: /note="Description of Artificial Sequence: Synthetic oligonucleotide"
  source: /note="RNA"
  source: /note="5' tri-ethylene glycol (TEG)"
  modified_base (1)..(1): bicyclic nucleic acid (BNA)
  modified_base (2)..(2): bicyclic nucleic acid (BNA)
  modified_base (5)..(5): 5-methyl modified nucleotide
  modified_base (9)..(9): 5-methyl modified nucleotide
  modified_base (10)..(10): 5-methyl modified nucleotide
  modified_base (14)..(14): 5-methyl modified nucleotide
  modified_base (15)..(15): 5-methyl modified nucleotide
  modified_base (16)..(16): 5-methyl modified nucleotide
  modified_base (17)..(17): bicyclic nucleic acid (BNA)
  modified_base (18)..(18): bicyclic nucleic acid (BNA)
aguucuguccaagcccgg

SEQ ID NO: 21055 - RNA, 17 nt, Artificial Sequence
  source: /note="Description of Artificial Sequence: Synthetic oligonucleotide"
  source: /note="RNA"
  source: /note="5' tri-ethylene glycol (TEG)"
  modified_base (1)..(1): bicyclic nucleic acid (BNA)
  modified_base (2)..(2): bicyclic nucleic acid (BNA)
  modified_base (5)..(5): 5-methyl modified nucleotide
  modified_base (9)..(9): 5-methyl modified nucleotide
  modified_base (10)..(10): 5-methyl modified nucleotide
  modified_base (14)..(14): 5-methyl modified nucleotide
  modified_base (15)..(15): 5-methyl modified nucleotide
  modified_base (16)..(16): 5-methyl bicyclic nucleic acid
  modified_base (17)..(17): bicyclic nucleic acid (BNA)
aguucuguccaagcccg

SEQ ID NO: 21056 - RNA, 16 nt, Artificial Sequence
  source: /note="Description of Artificial Sequence: Synthetic oligonucleotide"
  source: /note="RNA"
  source: /note="5' tri-ethylene glycol (TEG)"
  modified_base (1)..(1): bicyclic nucleic acid (BNA)
  modified_base (2)..(2): bicyclic nucleic acid (BNA)
  modified_base (5)..(5): 5-methyl modified nucleotide
  modified_base (9)..(9): 5-methyl modified nucleotide
  modified_base (10)..(10): 5-methyl modified nucleotide
  modified_base (14)..(14): 5-methyl modified nucleotide
  modified_base (15)..(15): 5-methyl bicyclic nucleic acid
  modified_base (16)..(16): 5-methyl bicyclic nucleic acid
aguucuguccaagccc

SEQ ID NO: 21057 - RNA, 15 nt, Artificial Sequence
  source: /note="Description of Artificial Sequence: Synthetic oligonucleotide"
  source: /note="RNA"
  source: /note="5' tri-ethylene glycol (TEG)"
  modified_base (1)..(1): bicyclic nucleic acid (BNA)
  modified_base (2)..(2): bicyclic nucleic acid (BNA)
  modified_base (5)..(5): 5-methyl modified nucleotide
  modified_base (9)..(9): 5-methyl modified nucleotide
  modified_base (10)..(10): 5-methyl modified nucleotide
  modified_base (14)..(14): 5-methyl bicyclic nucleic acid
  modified_base (15)..(15): 5-methyl bicyclic nucleic acid
aguucuguccaagcc

SEQ ID NO: 21058 - RNA, 14 nt, Artificial Sequence
  source: /note="Description of Artificial Sequence: Synthetic oligonucleotide"
  source: /note="RNA"
  source: /note="5' tri-ethylene glycol (TEG)"
  modified_base (1)..(1): bicyclic nucleic acid (BNA)
  modified_base (2)..(2): bicyclic nucleic acid (BNA)
  modified_base (5)..(5): 5-methyl modified nucleotide
  modified_base (9)..(9): 5-methyl modified nucleotide
  modified_base (10)..(10): 5-methyl modified nucleotide
  modified_base (13)..(13): bicyclic nucleic acid (BNA)
  modified_base (14)..(14): 5-methyl bicyclic nucleic acid
aguucuguccaagc

SEQ ID NO: 21059 - RNA, 13 nt, Artificial Sequence
  source: /note="Description of Artificial Sequence: Synthetic oligonucleotide"
  source: /note="RNA"
  source: /note="5' tri-ethylene glycol (TEG)"
  modified_base (1)..(1): bicyclic nucleic acid (BNA)
  modified_base (2)..(2): bicyclic nucleic acid (BNA)
  modified_base (5)..(5): 5-methyl modified nucleotide
  modified_base (9)..(9): 5-methyl modified nucleotide
  modified_base (10)..(10): 5-methyl modified nucleotide
  modified_base (12)..(12): bicyclic nucleic acid (BNA)
  modified_base (13)..(13): bicyclic nucleic acid (BNA)
aguucuguccaag

SEQ ID NO: 21060 - RNA, 12 nt, Artificial Sequence
  source: /note="Description of Artificial Sequence: Synthetic oligonucleotide"
  source: /note="RNA"
  source: /note="5' tri-ethylene glycol (TEG)"
  modified_base (1)..(1): bicyclic nucleic acid (BNA)
  modified_base (2)..(2): bicyclic nucleic acid (BNA)
  modified_base (5)..(5): 5-methyl modified nucleotide
  modified_base (9)..(9): 5-methyl modified nucleotide
  modified_base (10)..(10): 5-methyl modified nucleotide
  modified_base (11)..(11): bicyclic nucleic acid (BNA)
  modified_base (12)..(12): bicyclic nucleic acid (BNA)
aguucuguccaa

SEQ ID NO: 21061 - RNA, 11 nt, Artificial Sequence
  source: /note="Description of Artificial Sequence: Synthetic oligonucleotide"
  source: /note="RNA"
  source: /note="5' tri-ethylene glycol (TEG)"
  modified_base (1)..(1): bicyclic nucleic acid (BNA)
  modified_base (2)..(2): bicyclic nucleic acid (BNA)
  modified_base (5)..(5): 5-methyl modified nucleotide
  modified_base (9)..(9): 5-methyl modified nucleotide
  modified_base (10)..(10): 5-methyl bicyclic nucleic acid
  modified_base (11)..(11): bicyclic nucleic acid (BNA)
aguucugucca

SEQ ID NO: 21062 - RNA, 10 nt, Artificial Sequence
  source: /note="Description of Artificial Sequence: Synthetic oligonucleotide"
  source: /note="RNA"
  source: /note="5' tri-ethylene glycol (TEG)"
  modified_base (1)..(1): bicyclic nucleic acid (BNA)
  modified_base (2)..(2): bicyclic nucleic acid (BNA)
  modified_base (5)..(5): 5-methyl modified nucleotide
  modified_base (9)..(9): 5-methyl bicyclic nucleic acid
  modified_base (10)..(10): 5-methyl bicyclic nucleic acid
aguucugucc

SEQ ID NO: 21063 - DNA, 9 bp, Artificial Sequence
  source: /note="Description of Artificial Sequence: Synthetic oligonucleotide"
  source: /note="Description of Combined DNA/RNA Molecule: Synthetic oligonucleotide"
  source: /note="DNA/RNA"
  source: /note="5' tri-ethylene glycol (TEG)"
  modified_base (1)..(1): bicyclic nucleic acid (BNA)
  modified_base (2)..(2): bicyclic nucleic acid (BNA)
  modified_base (5)..(5): 5-methyl modified nucleotide
  modified_base (8)..(8): bicyclic nucleic acid (BNA)
  modified_base (9)..(9): 5-methyl bicyclic nucleic acid
aguucugtc

SEQ ID NO: 21064 - DNA, 8 bp, Artificial Sequence
  source: /note="Description of Artificial Sequence: Synthetic oligonucleotide"
  source: /note="Description of Combined DNA/RNA Molecule: Synthetic oligonucleotide"
  source: /note="DNA/RNA"
  source: /note="5' tri-ethylene glycol (TEG)"
  modified_base (1)..(1): bicyclic nucleic acid (BNA)
  modified_base (2)..(2): bicyclic nucleic acid (BNA)
  modified_base (5)..(5): 5-methyl modified nucleotide
  modified_base (7)..(7): bicyclic nucleic acid (BNA)
  modified_base (8)..(8): bicyclic nucleic acid (BNA)
aguucugt

SEQ ID NO: 21065 - DNA, 20 bp, Artificial Sequence
  source: /note="Description of Artificial Sequence: Synthetic oligonucleotide"
  source: /note="Description of Combined DNA/RNA Molecule: Synthetic oligonucleotide"
  source: /note="DNA/RNA"
  source: /note="5' tri-ethylene glycol (TEG)"
  modified_base (1)..(1): bicyclic nucleic acid (BNA)
  modified_base (2)..(2): bicyclic nucleic acid (BNA)
  modified_base (6)..(6): 5-methyl modified nucleotide
  modified_base (10)..(10): 5-methyl modified nucleotide
  modified_base (11)..(11): 5-methyl modified nucleotide
  modified_base (15)..(15): 5-methyl modified nucleotide
  modified_base (16)..(16): 5-methyl modified nucleotide
  modified_base (17)..(17): 5-methyl modified nucleotide
  modified_base (19)..(19): bicyclic nucleic acid (BNA)
  modified_base (20)..(20): bicyclic nucleic acid (BNA)
aaguucuguccaagcccggt

SEQ ID NO: 21066 - RNA, 19 nt, Artificial Sequence
  source: /note="Description of Artificial Sequence: Synthetic oligonucleotide"
  source: /note="RNA"
  source: /note="5' tri-ethylene glycol (TEG)"
  modified_base (1)..(1): bicyclic nucleic acid (BNA)
  modified_base (2)..(2): bicyclic nucleic acid (BNA)
  modified_base (6)..(6): 5-methyl modified nucleotide
  modified_base (10)..(10): 5-methyl modified nucleotide
  modified_base (11)..(11): 5-methyl modified nucleotide
  modified_base (15)..(15): 5-methyl modified nucleotide
  modified_base (16)..(16): 5-methyl modified nucleotide
  modified_base (17)..(17): 5-methyl modified nucleotide
  modified_base (18)..(18): bicyclic nucleic acid (BNA)
  modified_base (19)..(19): bicyclic nucleic acid (BNA)
aaguucuguccaagcccgg

SEQ ID NO: 21067 - RNA, 18 nt, Artificial Sequence
  source: /note="Description of Artificial Sequence: Synthetic oligonucleotide"
  source: /note="RNA"
  source: /note="5' tri-ethylene glycol (TEG)"
  modified_base (1)..(1): bicyclic nucleic acid (BNA)
  modified_base (2)..(2): bicyclic nucleic acid (BNA)
  modified_base (6)..(6): 5-methyl modified nucleotide
  modified_base (10)..(10): 5-methyl modified nucleotide
  modified_base (11)..(11): 5-methyl modified nucleotide
  modified_base (15)..(15): 5-methyl modified nucleotide
  modified_base (16)..(16): 5-methyl modified nucleotide
  modified_base (17)..(17): 5-methyl bicyclic nucleic acid
  modified_base (18)..(18): bicyclic nucleic acid (BNA)
aaguucuguccaagcccg

SEQ ID NO: 21068 - RNA, 17 nt, Artificial Sequence
  source: /note="Description of Artificial Sequence: Synthetic oligonucleotide"
  source: /note="RNA"
  source: /note="5' tri-ethylene glycol (TEG)"
  modified_base (1)..(1): bicyclic nucleic acid (BNA)
  modified_base (2)..(2): bicyclic nucleic acid (BNA)
  modified_base (6)..(6): 5-methyl modified nucleotide
  modified_base (10)..(10): 5-methyl modified nucleotide
  modified_base (11)..(11): 5-methyl modified nucleotide
  modified_base (15)..(15): 5-methyl modified nucleotide
  modified_base (16)..(16): 5-methyl bicyclic nucleic acid
  modified_base (17)..(17): 5-methyl bicyclic nucleic acid
aaguucuguccaagccc

SEQ ID NO: 21069 - RNA, 16 nt, Artificial Sequence
  source: /note="Description of Artificial Sequence: Synthetic oligonucleotide"
  source: /note="RNA"
  source: /note="5' tri-ethylene glycol (TEG)"
  modified_base (1)..(1): bicyclic nucleic acid (BNA)
  modified_base (2)..(2): bicyclic nucleic acid (BNA)
  modified_base (6)..(6): 5-methyl modified nucleotide
  modified_base (10)..(10): 5-methyl modified nucleotide
  modified_base (11)..(11): 5-methyl modified nucleotide
  modified_base (15)..(15): 5-methyl bicyclic nucleic acid
  modified_base (16)..(16): 5-methyl bicyclic nucleic acid
aaguucuguccaagcc

SEQ ID NO: 21070 - RNA, 15 nt, Artificial Sequence
  source: /note="Description of Artificial Sequence: Synthetic oligonucleotide"
  source: /note="RNA"
  source: /note="5' tri-ethylene glycol (TEG)"
  modified_base (1)..(1): bicyclic nucleic acid (BNA)
  modified_base (2)..(2): bicyclic nucleic acid (BNA)
  modified_base (6)..(6): 5-methyl modified nucleotide
  modified_base (10)..(10): 5-methyl modified nucleotide
  modified_base (11)..(11): 5-methyl modified nucleotide
  modified_base (14)..(14): bicyclic nucleic acid (BNA)
  modified_base (15)..(15): 5-methyl bicyclic nucleic acid
aaguucuguccaagc

SEQ ID NO: 21071 - RNA, 14 nt, Artificial Sequence
  source: /note="Description of Artificial Sequence: Synthetic oligonucleotide"
  source: /note="RNA"
  source: /note="5' tri-ethylene glycol (TEG)"
  modified_base (1)..(1): bicyclic nucleic acid (BNA)
  modified_base (2)..(2): bicyclic nucleic acid (BNA)
  modified_base (6)..(6): 5-methyl modified nucleotide
  modified_base (10)..(10): 5-methyl modified nucleotide
  modified_base (11)..(11): 5-methyl modified nucleotide
  modified_base (13)..(13): bicyclic nucleic acid (BNA)
  modified_base (14)..(14): bicyclic nucleic acid (BNA)
aaguucuguccaag

SEQ ID NO: 21072 - RNA, 13 nt, Artificial Sequence
  source: /note="Description of Artificial Sequence: Synthetic oligonucleotide"
  source: /note="RNA"
  source: /note="5' tri-ethylene glycol (TEG)"
  modified_base (1)..(1): bicyclic nucleic acid (BNA)
  modified_base (2)..(2): bicyclic nucleic acid (BNA)
  modified_base (6)..(6): 5-methyl modified nucleotide
  modified_base (10)..(10): 5-methyl modified nucleotide
  modified_base (11)..(11): 5-methyl modified nucleotide
  modified_base (12)..(12): bicyclic nucleic acid (BNA)
  modified_base (13)..(13): bicyclic nucleic acid (BNA)
aaguucuguccaa

SEQ ID NO: 21073 - RNA, 12 nt, Artificial Sequence
  source: /note="Description of Artificial Sequence: Synthetic oligonucleotide"
  source: /note="RNA"
  source: /note="5' tri-ethylene glycol (TEG)"
  modified_base (1)..(1): bicyclic nucleic acid (BNA)
  modified_base (2)..(2): bicyclic nucleic acid (BNA)
  modified_base (6)..(6): 5-methyl modified nucleotide
  modified_base (10)..(10): 5-methyl modified nucleotide
  modified_base (11)..(11): 5-methyl bicyclic nucleic acid
  modified_base (12)..(12): bicyclic nucleic acid (BNA)
aaguucugucca

SEQ ID NO: 21074 - RNA, 11 nt, Artificial Sequence
  source: /note="Description of Artificial Sequence: Synthetic oligonucleotide"
  source: /note="RNA"
  source: /note="5' tri-ethylene glycol (TEG)"
  modified_base (1)..(1): bicyclic nucleic acid (BNA)
  modified_base (2)..(2): bicyclic nucleic acid (BNA)
  modified_base (6)..(6): 5-methyl modified nucleotide
  modified_base (10)..(10): 5-methyl bicyclic nucleic acid
  modified_base (11)..(11): 5-methyl bicyclic nucleic acid
aaguucugucc

SEQ ID NO: 21075 - DNA, 10 bp, Artificial Sequence
  source: /note="Description of Artificial Sequence: Synthetic oligonucleotide"
  source: /note="Description of Combined DNA/RNA Molecule: Synthetic oligonucleotide"
  source: /note="DNA/RNA"
  source: /note="5' tri-ethylene glycol (TEG)"
  modified_base (1)..(1): bicyclic nucleic acid (BNA)
  modified_base (2)..(2): bicyclic nucleic acid (BNA)
  modified_base (6)..(6): 5-methyl modified nucleotide
  modified_base (9)..(9): bicyclic nucleic acid (BNA)
  modified_base (10)..(10): 5-methyl bicyclic nucleic acid
aaguucugtc

SEQ ID NO: 21076 - DNA, 9 bp, Artificial Sequence
  source: /note="Description of Artificial Sequence: Synthetic oligonucleotide"
  source: /note="Description of Combined DNA/RNA Molecule: Synthetic oligonucleotide"
  source: /note="DNA/RNA"
  source: /note="5' tri-ethylene glycol (TEG)"
  modified_base (1)..(1): bicyclic nucleic acid (BNA)
  modified_base (2)..(2): bicyclic nucleic acid (BNA)
  modified_base (6)..(6): 5-methyl modified nucleotide
  modified_base (8)..(8): bicyclic nucleic acid (BNA)
  modified_base (9)..(9): bicyclic nucleic acid (BNA)
aaguucugt

SEQ ID NO: 21077 - DNA, 8 bp, Artificial Sequence
  source: /note="Description of Artificial Sequence: Synthetic oligonucleotide"
  source: /note="Description of Combined DNA/RNA Molecule: Synthetic oligonucleotide"
  source: /note="DNA/RNA"
  source: /note="5' tri-ethylene glycol (TEG)"
  modified_base (1)..(1): bicyclic nucleic acid (BNA)
  modified_base (2)..(2): bicyclic nucleic acid (BNA)
  modified_base (6)..(6): 5-methyl modified nucleotide
  modified_base (7)..(7): bicyclic nucleic acid (BNA)
  modified_base (8)..(8): bicyclic nucleic acid (BNA)
aaguuctg

SEQ ID NO: 21078 - DNA, 20 bp, Artificial Sequence
  source: /note="Description of Artificial Sequence: Synthetic oligonucleotide"
  source: /note="Description of Combined DNA/RNA Molecule: Synthetic oligonucleotide"
  source: /note="DNA/RNA"
  source: /note="5' tri-ethylene glycol (TEG)"
  modified_base (1)..(1): bicyclic nucleic acid (BNA)
  modified_base (2)..(2): bicyclic nucleic acid (BNA)
  modified_base (7)..(7): 5-methyl modified nucleotide
  modified_base (11)..(11): 5-methyl modified nucleotide
  modified_base (12)..(12): 5-methyl modified nucleotide
  modified_base (16)..(16): 5-methyl modified nucleotide
  modified_base (17)..(17): 5-methyl modified nucleotide
  modified_base (18)..(18): 5-methyl modified nucleotide
  modified_base (19)..(19): bicyclic nucleic acid (BNA)
  modified_base (20)..(20): bicyclic nucleic acid (BNA)
taaguucuguccaagcccgg

SEQ ID NO: 21079 - DNA, 19 bp, Artificial Sequence
  source: /note="Description of Artificial Sequence: Synthetic oligonucleotide"
  source: /note="Description of Combined DNA/RNA Molecule: Synthetic oligonucleotide"
  source: /note="DNA/RNA"
  source: /note="5' tri-ethylene glycol (TEG)"
  modified_base (1)..(1): bicyclic nucleic acid (BNA)
  modified_base (2)..(2): bicyclic nucleic acid (BNA)
  modified_base (7)..(7): 5-methyl modified nucleotide
  modified_base (11)..(11): 5-methyl modified nucleotide
  modified_base (12)..(12): 5-methyl modified nucleotide
  modified_base (16)..(16): 5-methyl modified nucleotide
  modified_base (17)..(17): 5-methyl modified nucleotide
  modified_base (18)..(18): 5-methyl bicyclic nucleic acid
  modified_base (19)..(19): bicyclic nucleic acid (BNA)
taaguucuguccaagcccg

SEQ ID NO: 21080 - DNA, 18 bp, Artificial Sequence
  source: /note="Description of Artificial Sequence: Synthetic oligonucleotide"
  source: /note="Description of Combined DNA/RNA Molecule: Synthetic oligonucleotide"
  source: /note="DNA/RNA"
  source: /note="5' tri-ethylene glycol (TEG)"
  modified_base (1)..(1): bicyclic nucleic acid (BNA)
  modified_base (2)..(2): bicyclic nucleic acid (BNA)
  modified_base (7)..(7): 5-methyl modified nucleotide
  modified_base (11)..(11): 5-methyl modified nucleotide
  modified_base (12)..(12): 5-methyl modified nucleotide
  modified_base (16)..(16): 5-methyl modified nucleotide
  modified_base (17)..(17): 5-methyl bicyclic nucleic acid
  modified_base (18)..(18): 5-methyl bicyclic nucleic acid
taaguucuguccaagccc

SEQ ID NO: 21081 - DNA, 17 bp, Artificial Sequence
  source: /note="Description of Artificial Sequence: Synthetic oligonucleotide"
  source: /note="Description of Combined DNA/RNA Molecule: Synthetic oligonucleotide"
  source: /note="DNA/RNA"
  source: /note="5' tri-ethylene glycol (TEG)"
  modified_base (1)..(1): bicyclic nucleic acid (BNA)
  modified_base (2)..(2): bicyclic nucleic acid (BNA)
  modified_base (7)..(7): 5-methyl modified nucleotide
  modified_base (11)..(11): 5-methyl modified nucleotide
  modified_base (12)..(12): 5-methyl modified nucleotide
  modified_base (16)..(16): 5-methyl bicyclic nucleic acid
  modified_base (17)..(17): 5-methyl bicyclic nucleic acid
taaguucuguccaagcc

SEQ ID NO: 21082 - DNA, 16 bp, Artificial Sequence
  source: /note="Description of Artificial Sequence: Synthetic oligonucleotide"
  source: /note="Description of Combined DNA/RNA Molecule: Synthetic oligonucleotide"
  source: /note="DNA/RNA"
  source: /note="5' tri-ethylene glycol (TEG)"
  modified_base (1)..(1): bicyclic nucleic acid (BNA)
  modified_base (2)..(2): bicyclic nucleic acid (BNA)
  modified_base (7)..(7): 5-methyl modified nucleotide
  modified_base (11)..(11): 5-methyl modified nucleotide
  modified_base (12)..(12): 5-methyl modified nucleotide
  modified_base (15)..(15): bicyclic nucleic acid (BNA)
  modified_base (16)..(16): 5-methyl bicyclic nucleic acid
taaguucuguccaagc

SEQ ID NO: 21083 - DNA, 14 bp, Artificial Sequence
  source: /note="Description of Artificial Sequence: Synthetic oligonucleotide"
  source: /note="Description of Combined DNA/RNA Molecule: Synthetic oligonucleotide"
  source: /note="DNA/RNA"
  source: /note="5' tri-ethylene glycol (TEG)"
  modified_base (1)..(1): bicyclic nucleic acid (BNA)
  modified_base (2)..(2): bicyclic nucleic acid (BNA)
  modified_base (7)..(7): 5-methyl modified nucleotide
  modified_base (11)..(11): 5-methyl modified nucleotide
  modified_base (12)..(12): 5-methyl modified nucleotide
  modified_base (13)..(13): bicyclic nucleic acid (BNA)
  modified_base (14)..(14): bicyclic nucleic acid (BNA)
taaguucuguccaa

SEQ ID NO: 21084 - DNA, 13 bp, Artificial Sequence
  source: /note="Description of Artificial Sequence: Synthetic oligonucleotide"
  source: /note="Description of Combined DNA/RNA Molecule: Synthetic oligonucleotide"
  source: /note="DNA/RNA"
  source: /note="5' tri-ethylene glycol (TEG)"
  modified_base (1)..(1): bicyclic nucleic acid (BNA)
  modified_base (2)..(2): bicyclic nucleic acid (BNA)
  modified_base (7)..(7): 5-methyl modified nucleotide
  modified_base (11)..(11): 5-methyl modified nucleotide
  modified_base (12)..(12): 5-methyl bicyclic nucleic acid
  modified_base (13)..(13): bicyclic nucleic acid (BNA)
taaguucugucca

SEQ ID NO: 21085 - DNA, 12 bp, Artificial Sequence
  source: /note="Description of Artificial Sequence: Synthetic oligonucleotide"
  source: /note="Description of Combined DNA/RNA Molecule: Synthetic oligonucleotide"
  source: /note="DNA/RNA"
  source: /note="5' tri-ethylene glycol (TEG)"
  modified_base (1)..(1): bicyclic nucleic acid (BNA)
  modified_base (2)..(2): bicyclic nucleic acid (BNA)
  modified_base (7)..(7): 5-methyl modified nucleotide
  modified_base (11)..(11): 5-methyl bicyclic nucleic acid
  modified_base (12)..(12): 5-methyl bicyclic nucleic acid
taaguucugucc

SEQ ID NO: 21086 - DNA, 11 bp, Artificial Sequence
  source: /note="Description of Artificial Sequence: Synthetic oligonucleotide"
  source: /note="Description of Combined DNA/RNA Molecule: Synthetic oligonucleotide"
  source: /note="DNA/RNA"
  source: /note="5' tri-ethylene glycol (TEG)"
  modified_base (1)..(1): bicyclic nucleic acid (BNA)
  modified_base (2)..(2): bicyclic nucleic acid (BNA)
  modified_base (7)..(7): 5-methyl modified nucleotide
  modified_base (10)..(10): bicyclic nucleic acid (BNA)
  modified_base (11)..(11): 5-methyl bicyclic nucleic acid
taaguucugtc

SEQ ID NO: 21087 - DNA, 10 bp, Artificial Sequence
  source: /note="Description of Artificial Sequence: Synthetic oligonucleotide"
  source: /note="Description of Combined DNA/RNA Molecule: Synthetic oligonucleotide"
  source: /note="DNA/RNA"
  source: /note="5' tri-ethylene glycol (TEG)"
  modified_base (1)..(1): bicyclic nucleic acid (BNA)
  modified_base (2)..(2): bicyclic nucleic acid (BNA)
  modified_base (7)..(7): 5-methyl modified nucleotide
  modified_base (9)..(9): bicyclic nucleic acid (BNA)
  modified_base (10)..(10): bicyclic nucleic acid (BNA)
taaguucugt

SEQ ID NO: 21088 - DNA, 9 bp, Artificial Sequence
  source: /note="Description of Artificial Sequence: Synthetic oligonucleotide"
  source: /note="Description of Combined DNA/RNA Molecule: Synthetic oligonucleotide"
  source: /note="DNA/RNA"
  source: /note="5' tri-ethylene glycol (TEG)"
  modified_base (1)..(1): bicyclic nucleic acid (BNA)
  modified_base (2)..(2): bicyclic nucleic acid (BNA)
  modified_base (7)..(7): 5-methyl modified nucleotide
  modified_base (8)..(8): bicyclic nucleic acid (BNA)
  modified_base (9)..(9): bicyclic nucleic acid (BNA)
taaguuctg

SEQ ID NO: 21089 - DNA, 8 bp, Artificial Sequence
  source: /note="Description of Artificial Sequence: Synthetic oligonucleotide"
  source: /note="Description of Combined DNA/RNA Molecule: Synthetic oligonucleotide"
  source: /note="DNA/RNA"
  source: /note="5' tri-ethylene glycol (TEG)"
  modified_base (1)..(1): bicyclic nucleic acid (BNA)
  modified_base (2)..(2): bicyclic nucleic acid (BNA)
  modified_base (7)..(7): 5-methyl bicyclic nucleic acid
  modified_base (8)..(8): bicyclic nucleic acid (BNA)
taaguuct

SEQ ID NO: 21090 - DNA, 20 bp, Artificial Sequence
  source: /note="Description of Artificial Sequence: Synthetic oligonucleotide"
  source: /note="Description of Combined DNA/RNA Molecule: Synthetic oligonucleotide"
  source: /note="DNA/RNA"
  source: /note="5' tri-ethylene glycol (TEG)"
  modified_base (1)..(1): bicyclic nucleic acid (BNA)
  modified_base (2)..(2): bicyclic nucleic acid (BNA)
  modified_base (8)..(8): 5-methyl modified nucleotide
  modified_base (12)..(12): 5-methyl modified nucleotide
  modified_base (13)..(13): 5-methyl modified nucleotide
  modified_base (17)..(17): 5-methyl modified nucleotide
  modified_base (18)..(18): 5-methyl modified nucleotide
  modified_base (19)..(19): 5-methyl bicyclic nucleic acid
  modified_base (20)..(20): bicyclic nucleic acid (BNA)
gtaaguucuguccaagcccg

SEQ ID NO: 21091 - DNA, 19 bp, Artificial Sequence
  source: /note="Description of Artificial Sequence: Synthetic oligonucleotide"
  source: /note="Description of Combined DNA/RNA Molecule: Synthetic oligonucleotide"
  source: /note="DNA/RNA"
  source: /note="5' tri-ethylene glycol (TEG)"
  modified_base (1)..(1): bicyclic nucleic acid (BNA)
  modified_base (2)..(2): bicyclic nucleic acid (BNA)
  modified_base (8)..(8): 5-methyl modified nucleotide
  modified_base (12)..(12): 5-methyl modified nucleotide
  modified_base (13)..(13): 5-methyl modified nucleotide
  modified_base (17)..(17): 5-methyl modified nucleotide
  modified_base (18)..(18): 5-methyl bicyclic nucleic acid
  modified_base (19)..(19): 5-methyl bicyclic nucleic acid
gtaaguucuguccaagccc

SEQ ID NO: 21092 - DNA, 17 bp, Artificial Sequence
  source: /note="Description of Artificial Sequence: Synthetic oligonucleotide"
  source: /note="Description of Combined DNA/RNA Molecule: Synthetic oligonucleotide"
  source: /note="DNA/RNA"
  source: /note="5' tri-ethylene glycol (TEG)"
  modified_base (1)..(1): bicyclic nucleic acid (BNA)
  modified_base (2)..(2): bicyclic nucleic acid (BNA)
  modified_base (8)..(8): 5-methyl modified nucleotide
  modified_base (12)..(12): 5-methyl modified nucleotide
  modified_base (13)..(13): 5-methyl modified nucleotide
  modified_base (16)..(16): bicyclic nucleic acid (BNA)
  modified_base (17)..(17): 5-methyl bicyclic nucleic acid
gtaaguucuguccaagc

SEQ ID NO: 21093 - DNA, 16 bp, Artificial Sequence
  source: /note="Description of Artificial Sequence: Synthetic oligonucleotide"
  source: /note="Description of Combined DNA/RNA Molecule: Synthetic oligonucleotide"
  source: /note="DNA/RNA"
  source: /note="5' tri-ethylene glycol (TEG)"
  modified_base (1)..(1): bicyclic nucleic acid (BNA)
  modified_base (2)..(2): bicyclic nucleic acid (BNA)
  modified_base (8)..(8): 5-methyl modified nucleotide
  modified_base (12)..(12): 5-methyl modified nucleotide
  modified_base (13)..(13): 5-methyl modified nucleotide
  modified_base (15)..(15): bicyclic nucleic acid (BNA)
  modified_base (16)..(16): bicyclic nucleic acid (BNA)
gtaaguucuguccaag

SEQ ID NO: 21094 - DNA, 15 bp, Artificial Sequence
  source: /note="Description of Artificial Sequence: Synthetic oligonucleotide"
  source: /note="Description of Combined DNA/RNA Molecule: Synthetic oligonucleotide"
  source: /note="DNA/RNA"
  source: /note="5' tri-ethylene glycol (TEG)"
  modified_base (1)..(1): bicyclic nucleic acid (BNA)
  modified_base (2)..(2): bicyclic nucleic acid (BNA)
  modified_base (8)..(8): 5-methyl modified nucleotide
  modified_base (12)..(12): 5-methyl modified nucleotide
  modified_base (13)..(13): 5-methyl modified nucleotide
  modified_base (14)..(14): bicyclic nucleic acid (BNA)
  modified_base (15)..(15): bicyclic nucleic acid (BNA)
gtaaguucuguccaa

SEQ ID NO: 21095 - DNA, 14 bp, Artificial Sequence
  source: /note="Description of Artificial Sequence: Synthetic oligonucleotide"
  source: /note="Description of Combined DNA/RNA Molecule: Synthetic oligonucleotide"
  source: /note="DNA/RNA"
  source: /note="5' tri-ethylene glycol (TEG)"
  modified_base (1)..(1): bicyclic nucleic acid (BNA)
  modified_base (2)..(2): bicyclic nucleic acid (BNA)
  modified_base (8)..(8): 5-methyl modified nucleotide
  modified_base (12)..(12): 5-methyl modified nucleotide
  modified_base (13)..(13): 5-methyl bicyclic nucleic acid
  modified_base (14)..(14): bicyclic nucleic acid (BNA)
gtaaguucugucca

SEQ ID NO: 21096 - DNA, 13 bp, Artificial Sequence
  source: /note="Description of Artificial Sequence: Synthetic oligonucleotide"
  source: /note="Description of Combined DNA/RNA Molecule: Synthetic oligonucleotide"
  source: /note="DNA/RNA"
  source: /note="5' tri-ethylene glycol (TEG)"
  modified_base (1)..(1): bicyclic nucleic acid (BNA)
  modified_base (2)..(2): bicyclic nucleic acid (BNA)
  modified_base (8)..(8): 5-methyl modified nucleotide
  modified_base (12)..(12): 5-methyl bicyclic nucleic acid
  modified_base (13)..(13): 5-methyl bicyclic nucleic acid
gtaaguucugucc

SEQ ID NO: 21097 - DNA, 12 bp, Artificial Sequence
  source: /note="Description of Artificial Sequence: Synthetic oligonucleotide"
  source: /note="Description of Combined DNA/RNA Molecule: Synthetic oligonucleotide"
  source: /note="DNA/RNA"
  source: /note="5' tri-ethylene glycol (TEG)"
  modified_base (1)..(1): bicyclic nucleic acid (BNA)
  modified_base (2)..(2): bicyclic nucleic acid (BNA)
  modified_base (8)..(8): 5-methyl modified nucleotide
  modified_base (11)..(11): bicyclic nucleic acid (BNA)
  modified_base (12)..(12): 5-methyl bicyclic nucleic acid
gtaaguucugtc

SEQ ID NO: 21098 - DNA, 11 bp, Artificial Sequence
  source: /note="Description of Artificial Sequence: Synthetic oligonucleotide"
  source: /note="Description of Combined DNA/RNA Molecule: Synthetic oligonucleotide"
  source: /note="DNA/RNA"
  source: /note="5' tri-ethylene glycol (TEG)"
  modified_base (1)..(1): bicyclic nucleic acid (BNA)
  modified_base (2)..(2): bicyclic nucleic acid (BNA)
  modified_base (8)..(8): 5-methyl modified nucleotide
  modified_base (10)..(10): bicyclic nucleic acid (BNA)
  modified_base (11)..(11): bicyclic nucleic acid (BNA)
gtaaguucugt

SEQ ID NO: 21099 - DNA, 10 bp, Artificial Sequence
  source: /note="Description of Artificial Sequence: Synthetic oligonucleotide"
  source: /note="Description of Combined DNA/RNA Molecule: Synthetic oligonucleotide"
  source: /note="DNA/RNA"
  source: /note="5' tri-ethylene glycol (TEG)"
  modified_base (1)..(1): bicyclic nucleic acid (BNA)
  modified_base (2)..(2): bicyclic nucleic acid (BNA)
  modified_base (8)..(8): 5-methyl modified nucleotide
  modified_base (9)..(9): bicyclic nucleic acid (BNA)
  modified_base (10)..(10): bicyclic nucleic acid (BNA)
gtaaguuctg

SEQ ID NO: 21100 - DNA, 9 bp, Artificial Sequence
  source: /note="Description of Artificial Sequence: Synthetic oligonucleotide"
  source: /note="Description of Combined DNA/RNA Molecule: Synthetic oligonucleotide"
  source: /note="DNA/RNA"
  source: /note="5' tri-ethylene glycol (TEG)"
  modified_base (1)..(1): bicyclic nucleic acid (BNA)
  modified_base (2)..(2): bicyclic nucleic acid (BNA)
  modified_base (8)..(8): 5-methyl bicyclic nucleic acid
  modified_base (9)..(9): bicyclic nucleic acid (BNA)
gtaaguuct

SEQ ID NO: 21101 - DNA, 8 bp, Artificial Sequence
  source: /note="Description of Artificial Sequence: Synthetic oligonucleotide"
  source: /note="Description of Combined DNA/RNA Molecule: Synthetic oligonucleotide"
  source: /note="DNA/RNA"
  source: /note="5' tri-ethylene glycol (TEG)"
  modified_base (1)..(1): bicyclic nucleic acid (BNA)
  modified_base (2)..(2): bicyclic nucleic acid (BNA)
  modified_base (7)..(7): bicyclic nucleic acid (BNA)
  modified_base (8)..(8): 5-methyl bicyclic nucleic acid
gtaagutc

SEQ ID NO: 21102 - RNA, 20 nt, Artificial Sequence
  source: /note="Description of Artificial Sequence: Synthetic oligonucleotide"
  source: /note="RNA"
  source: /note="5' tri-ethylene glycol (TEG)"
  modified_base (1)..(1): bicyclic nucleic acid (BNA)
  modified_base (2)..(2): bicyclic nucleic acid (BNA)
  modified_base (9)..(9): 5-methyl modified nucleotide
  modified_base (13)..(13): 5-methyl modified nucleotide
  modified_base (14)..(14): 5-methyl modified nucleotide
  modified_base (18)..(18): 5-methyl modified nucleotide
  modified_base (19)..(19): 5-methyl bicyclic nucleic acid
  modified_base (20)..(20): 5-methyl bicyclic nucleic acid
gguaaguucuguccaagccc

SEQ ID NO: 21103 - RNA, 19 nt, Artificial Sequence
  source: /note="Description of Artificial Sequence: Synthetic oligonucleotide"
  source: /note="RNA"
  source: /note="5' tri-ethylene glycol (TEG)"
  modified_base (1)..(1): bicyclic nucleic acid (BNA)
  modified_base (2)..(2): bicyclic nucleic acid (BNA)
  modified_base (9)..(9): 5-methyl modified nucleotide
  modified_base (13)..(13): 5-methyl modified nucleotide
  modified_base (14)..(14): 5-methyl modified nucleotide
  modified_base (18)..(18): 5-methyl bicyclic nucleic acid
  modified_base (19)..(19): 5-methyl bicyclic nucleic acid
gguaaguucuguccaagcc

SEQ ID NO: 21104 - RNA, 17 nt, Artificial Sequence
  source: /note="Description of Artificial Sequence: Synthetic oligonucleotide"
  source: /note="RNA"
  source: /note="5' tri-ethylene glycol (TEG)"
  modified_base (1)..(1): bicyclic nucleic acid (BNA)
  modified_base (2)..(2): bicyclic nucleic acid (BNA)
  modified_base (9)..(9): 5-methyl modified nucleotide
  modified_base (13)..(13): 5-methyl modified nucleotide
  modified_base (14)..(14): 5-methyl modified nucleotide
  modified_base (16)..(16): bicyclic nucleic acid (BNA)
  modified_base (17)..(17): bicyclic nucleic acid (BNA)
gguaaguucuguccaag

SEQ ID NO: 21105 - RNA, 16 nt, Artificial Sequence
  source: /note="Description of Artificial Sequence: Synthetic oligonucleotide"
  source: /note="RNA"
  source: /note="5' tri-ethylene glycol (TEG)"
  modified_base (1)..(1): bicyclic nucleic acid (BNA)
  modified_base (2)..(2): bicyclic nucleic acid (BNA)
  modified_base (9)..(9): 5-methyl modified nucleotide
  modified_base (13)..(13): 5-methyl modified nucleotide
  modified_base (14)..(14): 5-methyl modified nucleotide
  modified_base (15)..(15): bicyclic nucleic acid (BNA)
  modified_base (16)..(16): bicyclic nucleic acid (BNA)
gguaaguucuguccaa

SEQ ID NO: 21106 - RNA, 15 nt, Artificial Sequence
  source: /note="Description of Artificial Sequence: Synthetic oligonucleotide"
  source: /note="RNA"
  source: /note="5' tri-ethylene glycol (TEG)"
  modified_base (1)..(1): bicyclic nucleic acid (BNA)
  modified_base (2)..(2): bicyclic nucleic acid (BNA)
  modified_base (9)..(9): 5-methyl modified nucleotide
  modified_base (13)..(13): 5-methyl modified nucleotide
  modified_base (14)..(14): 5-methyl bicyclic nucleic acid
  modified_base (15)..(15): bicyclic nucleic acid (BNA)
gguaaguucugucca

SEQ ID NO: 21107 - RNA, 14 nt, Artificial Sequence
  source: /note="Description of Artificial Sequence: Synthetic oligonucleotide"
  source: /note="RNA"
  source: /note="5' tri-ethylene glycol (TEG)"
  modified_base (1)..(1): bicyclic nucleic acid (BNA)
  modified_base (2)..(2): bicyclic nucleic acid (BNA)
  modified_base (9)..(9): 5-methyl modified nucleotide
  modified_base (13)..(13): 5-methyl bicyclic nucleic acid
  modified_base (14)..(14): 5-methyl bicyclic nucleic acid
gguaaguucugucc

SEQ ID NO: 21108 - DNA, 13 bp, Artificial Sequence
  source: /note="Description of Artificial Sequence: Synthetic oligonucleotide"
  source: /note="Description of Combined DNA/RNA Molecule: Synthetic oligonucleotide"
  source: /note="DNA/RNA"
  source: /note="5' tri-ethylene glycol (TEG)"
  modified_base (1)..(1): bicyclic nucleic acid (BNA)
  modified_base (2)..(2): bicyclic nucleic acid (BNA)
  modified_base (9)..(9): 5-methyl modified nucleotide
  modified_base (12)..(12): bicyclic nucleic acid (BNA)
  modified_base (13)..(13): 5-methyl bicyclic nucleic acid
gguaaguucugtc

SEQ ID NO: 21109 - DNA, 12 bp, Artificial Sequence
  source: /note="Description of Artificial Sequence: Synthetic oligonucleotide"
  source: /note="Description of Combined DNA/RNA Molecule: Synthetic oligonucleotide"
  source: /note="DNA/RNA"
  source: /note="5' tri-ethylene glycol (TEG)"
  modified_base (1)..(1): bicyclic nucleic acid (BNA)
  modified_base (2)..(2): bicyclic nucleic acid (BNA)
  modified_base (9)..(9): 5-methyl modified nucleotide
  modified_base (11)..(11): bicyclic nucleic acid (BNA)
  modified_base (12)..(12): bicyclic nucleic acid (BNA)
gguaaguucugt

SEQ ID NO: 21110 - DNA, 11 bp, Artificial Sequence
  source: /note="Description of Artificial Sequence: Synthetic oligonucleotide"
  source: /note="Description of Combined DNA/RNA Molecule: Synthetic oligonucleotide"
  source: /note="DNA/RNA"
  source: /note="5' tri-ethylene glycol (TEG)"
  modified_base (1)..(1): bicyclic nucleic acid (BNA)
  modified_base (2)..(2): bicyclic nucleic acid (BNA)
  modified_base (9)..(9): 5-methyl modified nucleotide
  modified_base (10)..(10): bicyclic nucleic acid (BNA)
  modified_base (11)..(11): bicyclic nucleic acid (BNA)
gguaaguuctg

SEQ ID NO: 21111 - DNA, 10 bp, Artificial Sequence
  source: /note="Description of Artificial Sequence: Synthetic oligonucleotide"
  source: /note="Description of Combined DNA/RNA Molecule: Synthetic oligonucleotide"
  source: /note="DNA/RNA"
  source: /note="5' tri-ethylene glycol (TEG)"
  modified_base (1)..(1): bicyclic nucleic acid (BNA)
  modified_base (2)..(2): bicyclic nucleic acid (BNA)
  modified_base (9)..(9): 5-methyl bicyclic nucleic acid
  modified_base (10)..(10): bicyclic nucleic acid (BNA)
gguaaguuct

SEQ ID NO: 21112 - DNA, 9 bp, Artificial Sequence
  source: /note="Description of Artificial Sequence: Synthetic oligonucleotide"
  source: /note="Description of Combined DNA/RNA Molecule: Synthetic oligonucleotide"
  source: /note="DNA/RNA"
  source: /note="5' tri-ethylene glycol (TEG)"
  modified_base (1)..(1): bicyclic nucleic acid (BNA)
  modified_base (2)..(2): bicyclic nucleic acid (BNA)
  modified_base (8)..(8): bicyclic nucleic acid (BNA)
  modified_base (9)..(9): 5-methyl bicyclic nucleic acid
gguaagutc

SEQ ID NO: 21113 - DNA, 8 bp, Artificial Sequence
  source: /note="Description of Artificial Sequence: Synthetic oligonucleotide"
  source: /note="Description of Combined DNA/RNA Molecule: Synthetic oligonucleotide"
  source: /note="DNA/RNA"
  source: /note="5' tri-ethylene glycol (TEG)"
  modified_base (1)..(1): bicyclic nucleic acid (BNA)
  modified_base (2)..(2): bicyclic nucleic acid (BNA)
  modified_base (7)..(7): bicyclic nucleic acid (BNA)
  modified_base (8)..(8): bicyclic nucleic acid (BNA)
gguaagtt

SEQ ID NO: 21114 - RNA, 20 nt, Artificial Sequence
  source: /note="Description of Artificial Sequence: Synthetic oligonucleotide"
  source: /note="RNA"
  source: /note="5' tri-ethylene glycol (TEG)"
  modified_base (1)..(1): 5-methyl bicyclic nucleic acid
  modified_base (2)..(2): bicyclic nucleic acid (BNA)
  modified_base (10)..(10): 5-methyl modified nucleotide
  modified_base (14)..(14): 5-methyl modified nucleotide
  modified_base (15)..(15): 5-methyl modified nucleotide
  modified_base (19)..(19): 5-methyl bicyclic nucleic acid
  modified_base (20)..(20): 5-methyl bicyclic nucleic acid
cgguaaguucuguccaagcc

SEQ ID NO: 21115 - RNA, 19 nt, Artificial Sequence
  source: /note="Description of Artificial Sequence: Synthetic oligonucleotide"
  source: /note="RNA"
  source: /note="5' tri-ethylene glycol (TEG)"
  modified_base (1)..(1): 5-methyl bicyclic nucleic acid
  modified_base (2)..(2): bicyclic nucleic acid (BNA)
  modified_base (10)..(10): 5-methyl modified nucleotide
  modified_base (14)..(14): 5-methyl modified nucleotide
  modified_base (15)..(15): 5-methyl modified nucleotide
  modified_base (18)..(18): bicyclic nucleic acid (BNA)
  modified_base (19)..(19): 5-methyl bicyclic nucleic acid
cgguaaguucuguccaagc

SEQ ID NO: 21116 - RNA, 18 nt, Artificial Sequence
  source: /note="Description of Artificial Sequence: Synthetic oligonucleotide"
  source: /note="RNA"
  source: /note="5' tri-ethylene glycol (TEG)"
  modified_base (1)..(1): 5-methyl bicyclic nucleic acid
  modified_base (2)..(2): bicyclic nucleic acid (BNA)
  modified_base (10)..(10): 5-methyl modified nucleotide
  modified_base (14)..(14): 5-methyl modified nucleotide
  modified_base (15)..(15): 5-methyl modified nucleotide
  modified_base (17)..(17): bicyclic nucleic acid (BNA)
  modified_base (18)..(18): bicyclic nucleic acid (BNA)
cgguaaguucuguccaag

SEQ ID NO: 21117 - RNA, 17 nt, Artificial Sequence
  source: /note="Description of Artificial Sequence: Synthetic oligonucleotide"
  source: /note="RNA"
  source: /note="5' tri-ethylene glycol (TEG)"
  modified_base (1)..(1): 5-methyl bicyclic nucleic acid
  modified_base (2)..(2): bicyclic nucleic acid (BNA)
  modified_base (10)..(10): 5-methyl modified nucleotide
  modified_base (14)..(14): 5-methyl modified nucleotide
  modified_base (15)..(15): 5-methyl modified nucleotide
  modified_base (16)..(16): bicyclic nucleic acid (BNA)
  modified_base (17)..(17): bicyclic nucleic acid (BNA)
cgguaaguucuguccaa

SEQ ID NO: 21118 - RNA, 16 nt, Artificial Sequence
  source: /note="Description of Artificial Sequence: Synthetic oligonucleotide"
  source: /note="RNA"
  source: /note="5' tri-ethylene glycol (TEG)"
  modified_base (1)..(1): 5-methyl bicyclic nucleic acid
  modified_base (2)..(2): bicyclic nucleic acid (BNA)
  modified_base (10)..(10): 5-methyl modified nucleotide
  modified_base (14)..(14): 5-methyl modified nucleotide
  modified_base (15)..(15): 5-methyl bicyclic nucleic acid
  modified_base (16)..(16): bicyclic nucleic acid (BNA)
cgguaaguucugucca

SEQ ID NO: 21119 - RNA, 15 nt, Artificial Sequence
  source: /note="Description of Artificial Sequence: Synthetic oligonucleotide"
  source: /note="RNA"
  source: /note="5' tri-ethylene glycol (TEG)"
  modified_base (1)..(1): 5-methyl bicyclic nucleic acid
  modified_base (2)..(2): bicyclic nucleic acid (BNA)
  modified_base (10)..(10): 5-methyl modified nucleotide
  modified_base (14)..(14): 5-methyl bicyclic nucleic acid
  modified_base (15)..(15): 5-methyl bicyclic nucleic acid
cgguaaguucugucc

SEQ ID NO: 21120 - DNA, 14 bp, Artificial Sequence
  source: /note="Description of Artificial Sequence: Synthetic oligonucleotide"
  source: /note="Description of Combined DNA/RNA Molecule: Synthetic oligonucleotide"
  source: /note="DNA/RNA"
  source: /note="5' tri-ethylene glycol (TEG)"
  modified_base (1)..(1): 5-methyl bicyclic nucleic acid
  modified_base (2)..(2): bicyclic nucleic acid (BNA)
  modified_base (10)..(10): 5-methyl modified nucleotide
  modified_base (13)..(13): bicyclic nucleic acid (BNA)
  modified_base (14)..(14): 5-methyl bicyclic nucleic acid
cgguaaguucugtc

SEQ ID NO: 21121 - DNA, 13 bp, Artificial Sequence
  source: /note="Description of Artificial Sequence: Synthetic oligonucleotide"
  source: /note="Description of Combined DNA/RNA Molecule: Synthetic oligonucleotide"
  source: /note="DNA/RNA"
  source: /note="5' tri-ethylene glycol (TEG)"
  modified_base (1)..(1): 5-methyl bicyclic nucleic acid
  modified_base (2)..(2): bicyclic nucleic acid (BNA)
  modified_base (10)..(10): 5-methyl modified nucleotide
  modified_base (12)..(12): bicyclic nucleic acid (BNA)
  modified_base (13)..(13): bicyclic nucleic acid (BNA)
cgguaaguucugt

SEQ ID NO: 21122 - DNA, 12 bp, Artificial Sequence
  source: /note="Description of Artificial Sequence: Synthetic oligonucleotide"
  source: /note="Description of Combined DNA/RNA Molecule: Synthetic oligonucleotide"
  source: /note="DNA/RNA"
  source: /note="5' tri-ethylene glycol (TEG)"
  modified_base (1)..(1): 5-methyl bicyclic nucleic acid
  modified_base (2)..(2): bicyclic nucleic acid (BNA)
  modified_base (10)..(10): 5-methyl modified nucleotide
  modified_base (11)..(11): bicyclic nucleic acid (BNA)
  modified_base (12)..(12): bicyclic nucleic acid (BNA)
cgguaaguuctg

SEQ ID NO: 21123 - DNA, 11 bp, Artificial Sequence
  source: /note="Description of Artificial Sequence: Synthetic oligonucleotide"
  source: /note="Description of Combined DNA/RNA Molecule: Synthetic oligonucleotide"
  source: /note="DNA/RNA"
  source: /note="5' tri-ethylene glycol (TEG)"
  modified_base (1)..(1): 5-methyl bicyclic nucleic acid
  modified_base (2)..(2): bicyclic nucleic acid (BNA)
  modified_base (10)..(10): 5-methyl bicyclic nucleic acid
  modified_base (11)..(11): bicyclic nucleic acid (BNA)
cgguaaguuct

SEQ ID NO: 21124 - DNA, 10 bp, Artificial Sequence
  source: /note="Description of Artificial Sequence: Synthetic oligonucleotide"
  source: /note="Description of Combined DNA/RNA Molecule: Synthetic oligonucleotide"
  source: /note="DNA/RNA"
  source: /note="5' tri-ethylene glycol (TEG)"
  modified_base (1)..(1): 5-methyl bicyclic nucleic acid
  modified_base (2)..(2): bicyclic nucleic acid (BNA)
  modified_base (9)..(9): bicyclic nucleic acid (BNA)
  modified_base (10)..(10): 5-methyl bicyclic nucleic acid
cgguaagutc

SEQ ID NO: 21125 - DNA, 9 bp, Artificial Sequence
  source: /note="Description of Artificial Sequence: Synthetic oligonucleotide"
  source: /note="Description of Combined DNA/RNA Molecule: Synthetic oligonucleotide"
  source: /note="DNA/RNA"
  source: /note="5' tri-ethylene glycol (TEG)"
  modified_base (1)..(1): 5-methyl bicyclic nucleic acid
  modified_base (2)..(2): bicyclic nucleic acid (BNA)
  modified_base (8)..(8): bicyclic nucleic acid (BNA)
  modified_base (9)..(9): bicyclic nucleic acid (BNA)
cgguaagtt

SEQ ID NO: 21126 - DNA, 8 bp, Artificial Sequence
  source: /note="Description of Artificial Sequence: Synthetic oligonucleotide"
  source: /note="Description of Combined DNA/RNA Molecule: Synthetic oligonucleotide"
  source: /note="DNA/RNA"
  source: /note="5' tri-ethylene glycol (TEG)"
  modified_base (1)..(1): 5-methyl bicyclic nucleic acid
  modified_base (2)..(2): bicyclic nucleic acid (BNA)
  modified_base (7)..(7): bicyclic nucleic acid (BNA)
  modified_base (8)..(8): bicyclic nucleic acid (BNA)
cgguaagt

SEQ ID NO: 21127 - DNA, 20 bp, Artificial Sequence
  source: /note="Description of Artificial Sequence: Synthetic oligonucleotide"
  source: /note="Description of Combined DNA/RNA Molecule: Synthetic oligonucleotide"
  source: /note="DNA/RNA"
  source: /note="5' tri-ethylene glycol (TEG)"
  modified_base (1)..(1): bicyclic nucleic acid (BNA)
  modified_base (2)..(2): 5-methyl bicyclic nucleic acid
  modified_base (11)..(11): 5-methyl modified nucleotide
  modified_base (15)..(15): 5-methyl modified nucleotide
  modified_base (16)..(16): 5-methyl modified nucleotide
  modified_base (19)..(19): bicyclic nucleic acid (BNA)
  modified_base (20)..(20): 5-methyl bicyclic nucleic acid
tcgguaaguucuguccaagc

SEQ ID NO: 21128 - DNA, 19 bp, Artificial Sequence
  source: /note="Description of Artificial Sequence: Synthetic oligonucleotide"
  source: /note="Description of Combined DNA/RNA Molecule: Synthetic oligonucleotide"
  source: /note="DNA/RNA"
  source: /note="5' tri-ethylene glycol (TEG)"
  modified_base (1)..(1): bicyclic nucleic acid (BNA)
  modified_base (2)..(2): 5-methyl bicyclic nucleic acid
  modified_base (11)..(11): 5-methyl modified nucleotide
  modified_base (15)..(15): 5-methyl modified nucleotide
  modified_base (16)..(16): 5-methyl modified nucleotide
  modified_base (18)..(18): bicyclic nucleic acid (BNA)
  modified_base (19)..(19): bicyclic nucleic acid (BNA)
tcgguaaguucuguccaag

SEQ ID NO: 21129 - DNA, 18 bp, Artificial Sequence
  source: /note="Description of Artificial Sequence: Synthetic oligonucleotide"
  source: /note="Description of Combined DNA/RNA Molecule: Synthetic oligonucleotide"
  source: /note="DNA/RNA"
  source: /note="5' tri-ethylene glycol (TEG)"
  modified_base (1)..(1): bicyclic nucleic acid (BNA)
  modified_base (2)..(2): 5-methyl bicyclic nucleic acid
  modified_base (11)..(11): 5-methyl modified nucleotide
  modified_base (15)..(15): 5-methyl modified nucleotide
  modified_base (16)..(16): 5-methyl modified nucleotide
  modified_base (17)..(17): bicyclic nucleic acid (BNA)
  modified_base (18)..(18): bicyclic nucleic acid (BNA)
tcgguaaguucuguccaa

SEQ ID NO: 21130 - DNA, 17 bp, Artificial Sequence
  source: /note="Description of Artificial Sequence: Synthetic oligonucleotide"
  source: /note="Description of Combined DNA/RNA Molecule: Synthetic oligonucleotide"
  source: /note="DNA/RNA"
  source: /note="5' tri-ethylene glycol (TEG)"
  modified_base (1)..(1): bicyclic nucleic acid (BNA)
  modified_base (2)..(2): 5-methyl bicyclic nucleic acid
  modified_base (11)..(11): 5-methyl modified nucleotide
  modified_base (15)..(15): 5-methyl modified nucleotide
  modified_base (16)..(16): 5-methyl bicyclic nucleic acid
  modified_base (17)..(17): bicyclic nucleic acid (BNA)
tcgguaaguucugucca

SEQ ID NO: 21131 - DNA, 16 bp, Artificial Sequence
  source: /note="Description of Artificial Sequence: Synthetic oligonucleotide"
  source: /note="Description of Combined DNA/RNA Molecule: Synthetic oligonucleotide"
  source: /note="DNA/RNA"
  source: /note="5' tri-ethylene glycol (TEG)"
  modified_base (1)..(1): bicyclic nucleic acid (BNA)
  modified_base (2)..(2): 5-methyl bicyclic nucleic acid
  modified_base (11)..(11): 5-methyl modified nucleotide
  modified_base (15)..(15): 5-methyl bicyclic nucleic acid
  modified_base (16)..(16): 5-methyl bicyclic nucleic acid
tcgguaaguucugucc

SEQ ID NO: 21132 - DNA, 15 bp, Artificial Sequence
  source: /note="Description of Artificial Sequence: Synthetic oligonucleotide"
  source: /note="Description of Combined DNA/RNA Molecule: Synthetic oligonucleotide"
  source: /note="DNA/RNA"
  source: /note="5' tri-ethylene glycol (TEG)"
  modified_base (1)..(1): bicyclic nucleic acid (BNA)
  modified_base (2)..(2): 5-methyl bicyclic nucleic acid
  modified_base (11)..(11): 5-methyl modified nucleotide
  modified_base (14)..(14): bicyclic nucleic acid (BNA)
  modified_base (15)..(15): 5-methyl bicyclic nucleic acid
tcgguaaguucugtc

SEQ ID NO: 21133 - DNA, 14 bp, Artificial Sequence
  source: /note="Description of Artificial Sequence: Synthetic oligonucleotide"
  source: /note="Description of Combined DNA/RNA Molecule: Synthetic oligonucleotide"
  source: /note="DNA/RNA"
  source: /note="5' tri-ethylene glycol (TEG)"
  modified_base (1)..(1): bicyclic nucleic acid (BNA)
  modified_base (2)..(2): 5-methyl bicyclic nucleic acid
  modified_base (11)..(11): 5-methyl modified nucleotide
  modified_base (13)..(13): bicyclic nucleic acid (BNA)
  modified_base (14)..(14): bicyclic nucleic acid (BNA)
tcgguaaguucugt

SEQ ID NO: 21134 - DNA, 13 bp, Artificial Sequence
  source: /note="Description of Artificial Sequence: Synthetic oligonucleotide"
  source: /note="Description of Combined DNA/RNA Molecule: Synthetic oligonucleotide"
  source: /note="DNA/RNA"
  source: /note="5' tri-ethylene glycol (TEG)"
  modified_base (1)..(1): bicyclic nucleic acid (BNA)
  modified_base (2)..(2): 5-methyl bicyclic nucleic acid
  modified_base (11)..(11): 5-methyl modified nucleotide
  modified_base (12)..(12): bicyclic nucleic acid (BNA)
  modified_base (13)..(13): bicyclic nucleic acid (BNA)
tcgguaaguuctg

SEQ ID NO: 21135 - DNA, 12 bp, Artificial Sequence
  source: /note="Description of Artificial Sequence: Synthetic oligonucleotide"
  source: /note="Description of Combined DNA/RNA Molecule: Synthetic oligonucleotide"
  source: /note="DNA/RNA"
  source: /note="5' tri-ethylene glycol (TEG)"
  modified_base (1)..(1): bicyclic nucleic acid (BNA)
  modified_base (2)..(2): 5-methyl bicyclic nucleic acid
  modified_base (11)..(11): 5-methyl bicyclic nucleic acid
  modified_base (12)..(12): bicyclic nucleic acid (BNA)
tcgguaaguuct

SEQ ID NO: 21136 - DNA, 11 bp, Artificial Sequence
  source: /note="Description of Artificial Sequence: Synthetic oligonucleotide"
  source: /note="Description of Combined DNA/RNA Molecule: Synthetic oligonucleotide"
  source: /note="DNA/RNA"
  source: /note="5' tri-ethylene glycol (TEG)"
  modified_base (1)..(1): bicyclic nucleic acid (BNA)
  modified_base (2)..(2): 5-methyl bicyclic nucleic acid
  modified_base (10)..(10): bicyclic nucleic acid (BNA)
  modified_base (11)..(11): 5-methyl bicyclic nucleic acid
tcgguaagutc

SEQ ID NO: 21137 - DNA, 10 bp, Artificial Sequence
  source: /note="Description of Artificial Sequence: Synthetic oligonucleotide"
  source: /note="Description of Combined DNA/RNA Molecule: Synthetic oligonucleotide"
  source: /note="DNA/RNA"
  source: /note="5' tri-ethylene glycol (TEG)"
  modified_base (1)..(1): bicyclic nucleic acid (BNA)
  modified_base (2)..(2): 5-methyl bicyclic nucleic acid
  modified_base (9)..(9): bicyclic nucleic acid (BNA)
  modified_base (10)..(10): bicyclic nucleic acid (BNA)
tcgguaagtt

SEQ ID NO: 21138 - DNA, 9 bp, Artificial Sequence
  source: /note="Description of Artificial Sequence: Synthetic oligonucleotide"
  source: /note="Description of Combined DNA/RNA Molecule: Synthetic oligonucleotide"
  source: /note="DNA/RNA"
  source: /note="5' tri-ethylene glycol (TEG)"
  modified_base (1)..(1): bicyclic nucleic acid (BNA)
  modified_base (2)..(2): 5-methyl bicyclic nucleic acid
  modified_base (8)..(8): bicyclic nucleic acid (BNA)
  modified_base (9)..(9): bicyclic nucleic acid (BNA)
tcgguaagt

SEQ ID NO: 21139 - DNA, 20 bp, Artificial Sequence
  source: /note="Description of Artificial Sequence: Synthetic oligonucleotide"
  source: /note="Description of Combined DNA/RNA Molecule: Synthetic oligonucleotide"
  source: /note="DNA/RNA"
  source: /note="5' tri-ethylene glycol (TEG)"
  modified_base (1)..(1): bicyclic nucleic acid (BNA)
  modified_base (2)..(2): bicyclic nucleic acid (BNA)
  modified_base (3)..(3): 5-methyl modified nucleotide
  modified_base (12)..(12): 5-methyl modified nucleotide
  modified_base (16)..(16): 5-methyl modified nucleotide
  modified_base (17)..(17): 5-methyl modified nucleotide
  modified_base (19)..(19): bicyclic nucleic acid (BNA)
  modified_base (20)..(20): bicyclic nucleic acid (BNA)
gtcgguaaguucuguccaag

SEQ ID NO: 21140 - DNA, 19 bp, Artificial Sequence
  source: /note="Description of Artificial Sequence: Synthetic oligonucleotide"
  source: /note="Description of Combined DNA/RNA Molecule: Synthetic oligonucleotide"
  source: /note="DNA/RNA"
  source: /note="5' tri-ethylene glycol (TEG)"
  modified_base (1)..(1): bicyclic nucleic acid (BNA)
  modified_base (2)..(2): bicyclic nucleic acid (BNA)
  modified_base (3)..(3): 5-methyl modified nucleotide
  modified_base (12)..(12): 5-methyl modified nucleotide
  modified_base (16)..(16): 5-methyl modified nucleotide
  modified_base (17)..(17): 5-methyl modified nucleotide
  modified_base (18)..(18): bicyclic nucleic acid (BNA)
  modified_base (19)..(19): bicyclic nucleic acid (BNA)
gtcgguaaguucuguccaa

SEQ ID NO: 21141 - DNA, 18 bp, Artificial Sequence
  source: /note="Description of Artificial Sequence: Synthetic oligonucleotide"
  source: /note="Description of Combined DNA/RNA Molecule: Synthetic oligonucleotide"
  source: /note="DNA/RNA"
  source: /note="5' tri-ethylene glycol (TEG)"
  modified_base (1)..(1): bicyclic nucleic acid (BNA)
  modified_base (2)..(2): bicyclic nucleic acid (BNA)
  modified_base (3)..(3): 5-methyl modified nucleotide
  modified_base (12)..(12): 5-methyl modified nucleotide
  modified_base (16)..(16): 5-methyl modified nucleotide
  modified_base (17)..(17): 5-methyl bicyclic nucleic acid
  modified_base (18)..(18): bicyclic nucleic acid (BNA)
gtcgguaaguucugucca

SEQ ID NO: 21142 - DNA, 17 bp, Artificial Sequence
  source: /note="Description of Artificial Sequence: Synthetic oligonucleotide"
  source: /note="Description of Combined DNA/RNA Molecule: Synthetic oligonucleotide"
  source: /note="DNA/RNA"
  source: /note="5' tri-ethylene glycol (TEG)"
  modified_base (1)..(1): bicyclic nucleic acid (BNA)
  modified_base (2)..(2): bicyclic nucleic acid (BNA)
  modified_base (3)..(3): 5-methyl modified nucleotide
  modified_base (12)..(12): 5-methyl modified nucleotide
  modified_base (16)..(16): 5-methyl bicyclic nucleic acid
  modified_base (17)..(17): 5-methyl bicyclic nucleic acid
gtcgguaaguucugucc

SEQ ID NO: 21143 - DNA, 16 bp, Artificial Sequence
  source: /note="Description of Artificial Sequence: Synthetic oligonucleotide"
  source: /note="Description of Combined DNA/RNA Molecule: Synthetic oligonucleotide"
  source: /note="DNA/RNA"
  source: /note="5' tri-ethylene glycol (TEG)"
  modified_base (1)..(1): bicyclic nucleic acid (BNA)
  modified_base (2)..(2): bicyclic nucleic acid (BNA)
  modified_base (3)..(3): 5-methyl modified nucleotide
  modified_base (12)..(12): 5-methyl modified nucleotide
  modified_base (15)..(15): bicyclic nucleic acid (BNA)
  modified_base (16)..(16): 5-methyl bicyclic nucleic acid
gtcgguaaguucugtc

SEQ ID NO: 21144 - DNA, 15 bp, Artificial Sequence
  source: /note="Description of Artificial Sequence: Synthetic oligonucleotide"
  source: /note="Description of Combined DNA/RNA Molecule: Synthetic oligonucleotide"
  source: /note="DNA/RNA"
  source: /note="5' tri-ethylene glycol (TEG)"
  modified_base (1)..(1): bicyclic nucleic acid (BNA)
  modified_base (2)..(2): bicyclic nucleic acid (BNA)
  modified_base (3)..(3): 5-methyl modified nucleotide
  modified_base (12)..(12): 5-methyl modified nucleotide
  modified_base (14)..(14): bicyclic nucleic acid (BNA)
  modified_base (15)..(15): bicyclic nucleic acid (BNA)
gtcgguaaguucugt

SEQ ID NO: 21145 - DNA, 14 bp, Artificial Sequence
  source: /note="Description of Artificial Sequence: Synthetic oligonucleotide"
  source: /note="Description of Combined DNA/RNA Molecule: Synthetic oligonucleotide"
  source: /note="DNA/RNA"
  source: /note="5' tri-ethylene glycol (TEG)"
  modified_base (1)..(1): bicyclic nucleic acid (BNA)
  modified_base (2)..(2): bicyclic nucleic acid (BNA)
  modified_base (3)..(3): 5-methyl modified nucleotide
  modified_base (12)..(12): 5-methyl modified nucleotide
  modified_base (13)..(13): bicyclic nucleic acid (BNA)
  modified_base (14)..(14): bicyclic nucleic acid (BNA)
gtcgguaaguuctg

SEQ ID NO: 21146 - DNA, 13 bp, Artificial Sequence
  source: /note="Description of Artificial Sequence: Synthetic oligonucleotide"
  source: /note="Description of Combined DNA/RNA Molecule: Synthetic oligonucleotide"
  source: /note="DNA/RNA"
  source: /note="5' tri-ethylene glycol (TEG)"
  modified_base (1)..(1): bicyclic nucleic acid (BNA)
  modified_base (2)..(2): bicyclic nucleic acid (BNA)
  modified_base (3)..(3): 5-methyl modified nucleotide
  modified_base (12)..(12): 5-methyl bicyclic nucleic acid
  modified_base (13)..(13): bicyclic nucleic acid (BNA)
gtcgguaaguuct

SEQ ID NO: 21147 - DNA, 12 bp, Artificial Sequence
  source: /note="Description of Artificial Sequence: Synthetic oligonucleotide"
  source: /note="Description of Combined DNA/RNA Molecule: Synthetic oligonucleotide"
  source: /note="DNA/RNA"
  source: /note="5' tri-ethylene glycol (TEG)"
  modified_base (1)..(1): bicyclic nucleic acid (BNA)
  modified_base (2)..(2): bicyclic nucleic acid (BNA)
  modified_base (3)..(3): 5-methyl modified nucleotide
  modified_base (11)..(11): bicyclic nucleic acid (BNA)
  modified_base (12)..(12): 5-methyl bicyclic nucleic acid
gtcgguaagutc

SEQ ID NO: 21148 - DNA, 11 bp, Artificial Sequence
  source: /note="Description of Artificial Sequence: Synthetic oligonucleotide"
  source: /note="Description of Combined DNA/RNA Molecule: Synthetic oligonucleotide"
  source: /note="DNA/RNA"
  source: /note="5' tri-ethylene glycol (TEG)"
  modified_base (1)..(1): bicyclic nucleic acid (BNA)
  modified_base (2)..(2): bicyclic nucleic acid (BNA)
  modified_base (3)..(3): 5-methyl modified nucleotide
  modified_base (10)..(10): bicyclic nucleic acid (BNA)
  modified_base (11)..(11): bicyclic nucleic acid (BNA)
gtcgguaagtt

SEQ ID NO: 21149 - DNA, 10 bp, Artificial Sequence
  source: /note="Description of Artificial Sequence: Synthetic oligonucleotide"
  source: /note="Description of Combined DNA/RNA Molecule: Synthetic oligonucleotide"
  source: /note="DNA/RNA"
  source: /note="5' tri-ethylene glycol (TEG)"
  modified_base (1)..(1): bicyclic nucleic acid (BNA)
  modified_base (2)..(2): bicyclic nucleic acid (BNA)
  modified_base (3)..(3): 5-methyl modified nucleotide
  modified_base (9)..(9): bicyclic nucleic acid (BNA)
  modified_base (10)..(10): bicyclic nucleic acid (BNA)
gtcgguaagt

SEQ ID NO: 21150 - RNA, 20 nt, Artificial Sequence
  source: /note="Description of Artificial Sequence: Synthetic oligonucleotide"
  source: /note="RNA"
  source: /note="5' tri-ethylene glycol (TEG)"
  modified_base (1)..(1): bicyclic nucleic acid (BNA)
  modified_base (2)..(2): bicyclic nucleic acid (BNA)
  modified_base (4)..(4): 5-methyl modified nucleotide
  modified_base (13)..(13): 5-methyl modified nucleotide
  modified_base (17)..(17): 5-methyl modified nucleotide
  modified_base (18)..(18): 5-methyl modified nucleotide
  modified_base (19)..(19): bicyclic nucleic acid (BNA)
  modified_base (20)..(20): bicyclic nucleic acid (BNA)
agucgguaaguucuguccaa

SEQ ID NO: 21151 - RNA, 19 nt, Artificial Sequence
  source: /note="Description of Artificial Sequence: Synthetic oligonucleotide"
  source: /note="RNA"
  source: /note="5' tri-ethylene glycol (TEG)"
  modified_base (1)..(1): bicyclic nucleic acid (BNA)
  modified_base (2)..(2): bicyclic nucleic acid (BNA)
  modified_base (4)..(4): 5-methyl modified nucleotide
  modified_base (13)..(13): 5-methyl modified nucleotide
  modified_base (17)..(17): 5-methyl modified nucleotide
  modified_base (18)..(18): 5-methyl bicyclic nucleic acid
  modified_base (19)..(19): bicyclic nucleic acid (BNA)
agucgguaaguucugucca

SEQ ID NO: 21152 - DNA, 17 bp, Artificial Sequence
  source: /note="Description of Artificial Sequence: Synthetic oligonucleotide"
  source: /note="Description of Combined DNA/RNA Molecule: Synthetic oligonucleotide"
  source: /note="DNA/RNA"
  source: /note="5' tri-ethylene glycol (TEG)"
  modified_base (1)..(1): bicyclic nucleic acid (BNA)
  modified_base (2)..(2): bicyclic nucleic acid (BNA)
  modified_base (4)..(4): 5-methyl modified nucleotide
  modified_base (13)..(13): 5-methyl modified nucleotide
  modified_base (16)..(16): bicyclic nucleic acid (BNA)
  modified_base (17)..(17): 5-methyl bicyclic nucleic acid
agucgguaaguucugtc

SEQ ID NO: 21153 - DNA, 16 bp, Artificial Sequence
  source: /note="Description of Artificial Sequence: Synthetic oligonucleotide"
  source: /note="Description of Combined DNA/RNA Molecule: Synthetic oligonucleotide"
  source: /note="DNA/RNA"
  source: /note="5' tri-ethylene glycol (TEG)"
  modified_base (1)..(1): bicyclic nucleic acid (BNA)
  modified_base (2)..(2): bicyclic nucleic acid (BNA)
  modified_base (4)..(4): 5-methyl modified nucleotide
  modified_base (13)..(13): 5-methyl modified nucleotide
  modified_base (15)..(15): bicyclic nucleic acid (BNA)
  modified_base (16)..(16): bicyclic nucleic acid (BNA)
agucgguaaguucugt

SEQ ID NO: 21154 - DNA, 15 bp, Artificial Sequence
  source: /note="Description of Artificial Sequence: Synthetic oligonucleotide"
  source: /note="Description of Combined DNA/RNA Molecule: Synthetic oligonucleotide"
  source: /note="DNA/RNA"
  source: /note="5' tri-ethylene glycol (TEG)"
  modified_base (1)..(1): bicyclic nucleic acid (BNA)
  modified_base (2)..(2): bicyclic nucleic acid (BNA)
  modified_base (4)..(4): 5-methyl modified nucleotide
  modified_base (13)..(13): 5-methyl modified nucleotide
  modified_base (14)..(14): bicyclic nucleic acid (BNA)
  modified_base (15)..(15): bicyclic nucleic acid (BNA)
agucgguaaguuctg

SEQ ID NO: 21155 - DNA, 14 bp, Artificial Sequence
  source: /note="Description of Artificial Sequence: Synthetic oligonucleotide"
  source: /note="Description of Combined DNA/RNA Molecule: Synthetic oligonucleotide"
  source: /note="DNA/RNA"
  source: /note="5' tri-ethylene glycol (TEG)"
  modified_base (1)..(1): bicyclic nucleic acid (BNA)
  modified_base (2)..(2): bicyclic nucleic acid (BNA)
  modified_base (4)..(4): 5-methyl modified nucleotide
  modified_base (13)..(13): 5-methyl bicyclic nucleic acid
  modified_base (14)..(14): bicyclic nucleic acid (BNA)
agucgguaaguuct

SEQ ID NO: 21156 - DNA, 13 bp, Artificial Sequence
  source: /note="Description of Artificial Sequence: Synthetic oligonucleotide"
  source: /note="Description of Combined DNA/RNA Molecule: Synthetic oligonucleotide"
  source: /note="DNA/RNA"
  source: /note="5' tri-ethylene glycol (TEG)"
  modified_base (1)..(1): bicyclic nucleic acid (BNA)
  modified_base (2)..(2): bicyclic nucleic acid (BNA)
  modified_base (4)..(4): 5-methyl modified nucleotide
  modified_base (12)..(12): bicyclic nucleic acid (BNA)
  modified_base (13)..(13): 5-methyl bicyclic nucleic acid
agucgguaagutc

SEQ ID NO: 21157 - DNA, 12 bp, Artificial Sequence
  source: /note="Description of Artificial Sequence: Synthetic oligonucleotide"
  source: /note="Description of Combined DNA/RNA Molecule: Synthetic oligonucleotide"
  source: /note="DNA/RNA"
  source: /note="5' tri-ethylene glycol (TEG)"
  modified_base (1)..(1): bicyclic nucleic acid (BNA)
  modified_base (2)..(2): bicyclic nucleic acid (BNA)
  modified_base (4)..(4): 5-methyl modified nucleotide
  modified_base (11)..(11): bicyclic nucleic acid (BNA)
  modified_base (12)..(12): bicyclic nucleic acid (BNA)
agucgguaagtt

SEQ ID NO: 21158 - DNA, 11 bp, Artificial Sequence
  source: /note="Description of Artificial Sequence: Synthetic oligonucleotide"
  source: /note="Description of Combined DNA/RNA Molecule: Synthetic oligonucleotide"
  source: /note="DNA/RNA"
  source: /note="5' tri-ethylene glycol (TEG)"
  modified_base (1)..(1): bicyclic nucleic acid (BNA)
  modified_base (2)..(2): bicyclic nucleic acid (BNA)
  modified_base (4)..(4): 5-methyl modified nucleotide
  modified_base (10)..(10): bicyclic nucleic acid (BNA)
  modified_base (11)..(11): bicyclic nucleic acid (BNA)
agucgguaagt

SEQ ID NO: 21159 - RNA, 20 nt, Artificial Sequence
  source: /note="Description of Artificial Sequence: Synthetic oligonucleotide"
  source: /note="RNA"
  source: /note="5' tri-ethylene glycol (TEG)"
  modified_base (1)..(1): 5-methyl bicyclic nucleic acid
  modified_base (2)..(2): bicyclic nucleic acid (BNA)
  modified_base (5)..(5): 5-methyl modified nucleotide
  modified_base (14)..(14): 5-methyl modified nucleotide
  modified_base (18)..(18): 5-methyl modified nucleotide
  modified_base (19)..(19): 5-methyl bicyclic nucleic acid
  modified_base (20)..(20): bicyclic nucleic acid (BNA)
cagucgguaaguucugucca

SEQ ID NO: 21160 - RNA, 19 nt, Artificial Sequence
  source: /note="Description of Artificial Sequence: Synthetic oligonucleotide"
  source: /note="RNA"
  source: /note="5' tri-ethylene glycol (TEG)"
  modified_base (1)..(1): 5-methyl bicyclic nucleic acid
  modified_base (2)..(2): bicyclic nucleic acid (BNA)
  modified_base (5)..(5): 5-methyl modified nucleotide
  modified_base (14)..(14): 5-methyl modified nucleotide
  modified_base (18)..(18): 5-methyl bicyclic nucleic acid
  modified_base (19)..(19): 5-methyl bicyclic nucleic acid
cagucgguaaguucugucc

SEQ ID NO: 21161 - DNA, 18 bp, Artificial Sequence
  source: /note="Description of Artificial Sequence: Synthetic oligonucleotide"
  source: /note="Description of Combined DNA/RNA Molecule: Synthetic oligonucleotide"
  source: /note="DNA/RNA"
  source: /note="5' tri-ethylene glycol (TEG)"
  modified_base (1)..(1): 5-methyl bicyclic nucleic acid
  modified_base (2)..(2): bicyclic nucleic acid (BNA)
  modified_base (5)..(5): 5-methyl modified nucleotide
  modified_base (14)..(14): 5-methyl modified nucleotide
  modified_base (17)..(17): bicyclic nucleic acid (BNA)
  modified_base (18)..(18): 5-methyl bicyclic nucleic acid
cagucgguaaguucugtc

SEQ ID NO: 21162 - DNA, 17 bp, Artificial Sequence
  source: /note="Description of Artificial Sequence: Synthetic oligonucleotide"
  source: /note="Description of Combined DNA/RNA Molecule: Synthetic oligonucleotide"
  source: /note="DNA/RNA"
  source: /note="5' tri-ethylene glycol (TEG)"
  modified_base (1)..(1): 5-methyl bicyclic nucleic acid
  modified_base (2)..(2): bicyclic nucleic acid (BNA)
  modified_base (5)..(5): 5-methyl modified nucleotide
  modified_base (14)..(14): 5-methyl modified nucleotide
  modified_base (16)..(16): bicyclic nucleic acid (BNA)
  modified_base (17)..(17): bicyclic nucleic acid (BNA)
cagucgguaaguucugt

SEQ ID NO: 21163 - DNA, 16 bp, Artificial Sequence
  source: /note="Description of Artificial Sequence: Synthetic oligonucleotide"
  source: /note="Description of Combined DNA/RNA Molecule: Synthetic oligonucleotide"
  source: /note="DNA/RNA"
  source: /note="5' tri-ethylene glycol (TEG)"
  modified_base (1)..(1): 5-methyl bicyclic nucleic acid
  modified_base (2)..(2): bicyclic nucleic acid (BNA)
  modified_base (5)..(5): 5-methyl modified nucleotide
  modified_base (14)..(14): 5-methyl modified nucleotide
  modified_base (15)..(15): bicyclic nucleic acid (BNA)
  modified_base (16)..(16): bicyclic nucleic acid (BNA)
cagucgguaaguuctg

SEQ ID NO: 21164 - DNA, 15 bp, Artificial Sequence
  source: /note="Description of Artificial Sequence: Synthetic oligonucleotide"
  source: /note="Description of Combined DNA/RNA Molecule: Synthetic oligonucleotide"
  source: /note="DNA/RNA"
  source: /note="5' tri-ethylene glycol (TEG)"
  modified_base (1)..(1): 5-methyl bicyclic nucleic acid
  modified_base (2)..(2): bicyclic nucleic acid (BNA)
  modified_base (5)..(5): 5-methyl modified nucleotide
  modified_base (14)..(14): 5-methyl bicyclic nucleic acid
  modified_base (15)..(15): bicyclic nucleic acid (BNA)
cagucgguaaguuct

SEQ ID NO: 21165 - DNA, 14 bp, Artificial Sequence
  source: /note="Description of Artificial Sequence: Synthetic oligonucleotide"
  source: /note="Description of Combined DNA/RNA Molecule: Synthetic oligonucleotide"
  source: /note="DNA/RNA"
  source: /note="5' tri-ethylene glycol (TEG)"
  modified_base (1)..(1): 5-methyl bicyclic nucleic acid
  modified_base (2)..(2): bicyclic nucleic acid (BNA)
  modified_base (5)..(5): 5-methyl modified nucleotide
  modified_base (13)..(13): bicyclic nucleic acid (BNA)
  modified_base (14)..(14): 5-methyl bicyclic nucleic acid
cagucgguaagutc

SEQ ID NO: 21166 - DNA, 13 bp, Artificial Sequence
  source: /note="Description of Artificial Sequence: Synthetic oligonucleotide"
  source: /note="Description of Combined DNA/RNA Molecule: Synthetic oligonucleotide"
  source: /note="DNA/RNA"
  source: /note="5' tri-ethylene glycol (TEG)"
  modified_base (1)..(1): 5-methyl bicyclic nucleic acid
  modified_base (2)..(2): bicyclic nucleic acid (BNA)
  modified_base (5)..(5): 5-methyl modified nucleotide
  modified_base (12)..(12): bicyclic nucleic acid (BNA)
  modified_base (13)..(13): bicyclic nucleic acid (BNA)
cagucgguaagtt

SEQ ID NO: 21167 - DNA, 12 bp, Artificial Sequence
  source: /note="Description of Artificial Sequence: Synthetic oligonucleotide"
  source: /note="Description of Combined DNA/RNA Molecule: Synthetic oligonucleotide"
  source: /note="DNA/RNA"
  source: /note="5' tri-ethylene glycol (TEG)"
  modified_base (1)..(1): 5-methyl bicyclic nucleic acid
  modified_base (2)..(2): bicyclic nucleic acid (BNA)
  modified_base (5)..(5): 5-methyl modified nucleotide
  modified_base (11)..(11): bicyclic nucleic acid (BNA)
  modified_base (12)..(12): bicyclic nucleic acid (BNA)
cagucgguaagt

SEQ ID NO: 21168 - RNA, 20 nt, Artificial Sequence
  source: /note="Description of Artificial Sequence: Synthetic oligonucleotide"
  source: /note="RNA"
  source: /note="5' tri-ethylene glycol (TEG)"
  modified_base (1)..(1): 5-methyl bicyclic nucleic acid
  modified_base (2)..(2): 5-methyl bicyclic nucleic acid
  modified_base (6)..(6): 5-methyl modified nucleotide
  modified_base (15)..(15): 5-methyl modified nucleotide
  modified_base (19)..(19): 5-methyl bicyclic nucleic acid
  modified_base (20)..(20): 5-methyl bicyclic nucleic acid
ccagucgguaaguucugucc

SEQ ID NO: 21169 - DNA, 19 bp, Artificial Sequence
  source: /note="Description of Artificial Sequence: Synthetic oligonucleotide"
  source: /note="Description of Combined DNA/RNA Molecule: Synthetic oligonucleotide"
  source: /note="DNA/RNA"
  source: /note="5' tri-ethylene glycol (TEG)"
  modified_base (1)..(1): 5-methyl bicyclic nucleic acid
  modified_base (2)..(2): 5-methyl bicyclic nucleic acid
  modified_base (6)..(6): 5-methyl modified nucleotide
  modified_base (15)..(15): 5-methyl modified nucleotide
  modified_base (18)..(18): bicyclic nucleic acid (BNA)
  modified_base (19)..(19): 5-methyl bicyclic nucleic acid
ccagucgguaaguucugtc

SEQ ID NO: 21170 - DNA, 18 bp, Artificial Sequence
  source: /note="Description of Artificial Sequence: Synthetic oligonucleotide"
  source: /note="Description of Combined DNA/RNA Molecule: Synthetic oligonucleotide"
  source: /note="DNA/RNA"
  source: /note="5' tri-ethylene glycol (TEG)"
  modified_base (1)..(1): 5-methyl bicyclic nucleic acid
  modified_base (2)..(2): 5-methyl bicyclic nucleic acid
  modified_base (6)..(6): 5-methyl modified nucleotide
  modified_base (15)..(15): 5-methyl modified nucleotide
  modified_base (17)..(17): bicyclic nucleic acid (BNA)
  modified_base (18)..(18): bicyclic nucleic acid (BNA)
ccagucgguaaguucugt

SEQ ID NO: 21171 - DNA, 17 bp, Artificial Sequence
  source: /note="Description of Artificial Sequence: Synthetic oligonucleotide"
  source: /note="Description of Combined DNA/RNA Molecule: Synthetic oligonucleotide"
  source: /note="DNA/RNA"
  source: /note="5' tri-ethylene glycol (TEG)"
  modified_base (1)..(1): 5-methyl bicyclic nucleic acid
  modified_base (2)..(2): 5-methyl bicyclic nucleic acid
  modified_base (6)..(6): 5-methyl modified nucleotide
  modified_base (15)..(15): 5-methyl modified nucleotide
  modified_base (16)..(16): bicyclic nucleic acid (BNA)
  modified_base (17)..(17): bicyclic nucleic acid (BNA)
ccagucgguaaguuctg

SEQ ID NO: 21172 - DNA, 16 bp, Artificial Sequence
  source: /note="Description of Artificial Sequence: Synthetic oligonucleotide"
  source: /note="Description of Combined DNA/RNA Molecule: Synthetic oligonucleotide"
  source: /note="DNA/RNA"
  source: /note="5' tri-ethylene glycol (TEG)"
  modified_base (1)..(1): 5-methyl bicyclic nucleic acid
  modified_base (2)..(2): 5-methyl bicyclic nucleic acid
  modified_base (6)..(6): 5-methyl modified nucleotide
  modified_base (15)..(15): 5-methyl bicyclic nucleic acid
  modified_base (16)..(16): bicyclic nucleic acid (BNA)
ccagucgguaaguuct

SEQ ID NO: 21173 - DNA, 15 bp, Artificial Sequence
  source: /note="Description of Artificial Sequence: Synthetic oligonucleotide"
  source: /note="Description of Combined DNA/RNA Molecule: Synthetic oligonucleotide"
  source: /note="DNA/RNA"
  source: /note="5' tri-ethylene glycol (TEG)"
  modified_base (1)..(1): 5-methyl bicyclic nucleic acid
  modified_base (2)..(2): 5-methyl bicyclic nucleic acid
  modified_base (6)..(6): 5-methyl modified nucleotide
  modified_base (14)..(14): bicyclic nucleic acid (BNA)
  modified_base (15)..(15): 5-methyl bicyclic nucleic acid
ccagucgguaagutc

SEQ ID NO: 21174 - DNA, 14 bp, Artificial Sequence
  source: /note="Description of Artificial Sequence: Synthetic oligonucleotide"
  source: /note="Description of Combined DNA/RNA Molecule: Synthetic oligonucleotide"
  source: /note="DNA/RNA"
  source: /note="5' tri-ethylene glycol (TEG)"
  modified_base (1)..(1): 5-methyl bicyclic nucleic acid
  modified_base (2)..(2): 5-methyl bicyclic nucleic acid
  modified_base (6)..(6): 5-methyl modified nucleotide
  modified_base (13)..(13): bicyclic nucleic acid (BNA)
  modified_base (14)..(14): bicyclic nucleic acid (BNA)
ccagucgguaagtt

SEQ ID NO: 21175 - DNA, 13 bp, Artificial Sequence
  source: /note="Description of Artificial Sequence: Synthetic oligonucleotide"
  source: /note="Description of Combined DNA/RNA Molecule: Synthetic oligonucleotide"
  source: /note="DNA/RNA"
  source: /note="5' tri-ethylene glycol (TEG)"
  modified_base (1)..(1): 5-methyl bicyclic nucleic acid
  modified_base (2)..(2): 5-methyl bicyclic nucleic acid
  modified_base (6)..(6): 5-methyl modified nucleotide
  modified_base (12)..(12): bicyclic nucleic acid (BNA)
  modified_base (13)..(13): bicyclic nucleic acid (BNA)
ccagucgguaagt

SEQ ID NO: 21176 - DNA, 20 bp, Artificial Sequence
  source: /note="Description of Artificial Sequence: Synthetic oligonucleotide"
  source: /note="Description of Combined DNA/RNA Molecule: Synthetic oligonucleotide"
  source: /note="DNA/RNA"
  source: /note="5' tri-ethylene glycol (TEG)"
  modified_base (1)..(1): bicyclic nucleic acid (BNA)
  modified_base (2)..(2): 5-methyl bicyclic nucleic acid
  modified_base (3)..(3): 5-methyl modified nucleotide
  modified_base (7)..(7): 5-methyl modified nucleotide
  modified_base (16)..(16): 5-methyl modified nucleotide
  modified_base (19)..(19): bicyclic nucleic acid (BNA)
  modified_base (20)..(20): 5-methyl bicyclic nucleic acid
gccagucgguaaguucugtc

SEQ ID NO: 21177 - DNA, 19 bp, Artificial Sequence
  source: /note="Description of Artificial Sequence: Synthetic oligonucleotide"
  source: /note="Description of Combined DNA/RNA Molecule: Synthetic oligonucleotide"
  source: /note="DNA/RNA"
  source: /note="5' tri-ethylene glycol (TEG)"
  modified_base (1)..(1): bicyclic nucleic acid (BNA)
  modified_base (2)..(2): 5-methyl bicyclic nucleic acid
  modified_base (3)..(3): 5-methyl modified nucleotide
  modified_base (7)..(7): 5-methyl modified nucleotide
  modified_base (16)..(16): 5-methyl modified nucleotide
  modified_base (18)..(18): bicyclic nucleic acid (BNA)
  modified_base (19)..(19): bicyclic nucleic acid (BNA)
gccagucgguaaguucugt

SEQ ID NO: 21178 - DNA, 18 bp, Artificial Sequence
  source: /note="Description of Artificial Sequence: Synthetic oligonucleotide"
  source: /note="Description of Combined DNA/RNA Molecule: Synthetic oligonucleotide"
  source: /note="DNA/RNA"
  source: /note="5' tri-ethylene glycol (TEG)"
  modified_base (1)..(1): bicyclic nucleic acid (BNA)
  modified_base (2)..(2): 5-methyl bicyclic nucleic acid
  modified_base (3)..(3): 5-methyl modified nucleotide
  modified_base (7)..(7): 5-methyl modified nucleotide
  modified_base (16)..(16): 5-methyl modified nucleotide
  modified_base (17)..(17): bicyclic nucleic acid (BNA)
  modified_base (18)..(18): bicyclic nucleic acid (BNA)
gccagucgguaaguuctg

SEQ ID NO: 21179 - DNA, 17 bp, Artificial Sequence
  source: /note="Description of Artificial Sequence: Synthetic oligonucleotide"
  source: /note="Description of Combined DNA/RNA Molecule: Synthetic oligonucleotide"
  source: /note="DNA/RNA"
  source: /note="5' tri-ethylene glycol (TEG)"
  modified_base (1)..(1): bicyclic nucleic acid (BNA)
  modified_base (2)..(2): 5-methyl bicyclic nucleic acid
  modified_base (3)..(3): 5-methyl modified nucleotide
  modified_base (7)..(7): 5-methyl modified nucleotide
  modified_base (16)..(16): 5-methyl bicyclic nucleic acid
  modified_base (17)..(17): bicyclic nucleic acid (BNA)
gccagucgguaaguuct

SEQ ID NO: 21180 - DNA, 16 bp, Artificial Sequence
  source: /note="Description of Artificial Sequence: Synthetic oligonucleotide"
  source: /note="Description of Combined DNA/RNA Molecule: Synthetic oligonucleotide"
  source: /note="DNA/RNA"
  source: /note="5' tri-ethylene glycol (TEG)"
  modified_base (1)..(1): bicyclic nucleic acid (BNA)
  modified_base (2)..(2): 5-methyl bicyclic nucleic acid
  modified_base (3)..(3): 5-methyl modified nucleotide
  modified_base (7)..(7): 5-methyl modified nucleotide
  modified_base (15)..(15): bicyclic nucleic acid (BNA)
  modified_base (16)..(16): 5-methyl bicyclic nucleic acid
gccagucgguaagutc

SEQ ID NO: 21181 - DNA, 15 bp, Artificial Sequence
  source: /note="Description of Artificial Sequence: Synthetic oligonucleotide"
  source: /note="Description of Combined DNA/RNA Molecule: Synthetic oligonucleotide"
  source: /note="DNA/RNA"
  source: /note="5' tri-ethylene glycol (TEG)"
  modified_base (1)..(1): bicyclic nucleic acid (BNA)
  modified_base (2)..(2): 5-methyl bicyclic nucleic acid
  modified_base (3)..(3): 5-methyl modified nucleotide
  modified_base (7)..(7): 5-methyl modified nucleotide
  modified_base (14)..(14): bicyclic nucleic acid (BNA)
  modified_base (15)..(15): bicyclic nucleic acid (BNA)
gccagucgguaagtt

SEQ ID NO: 21182 - DNA, 14 bp, Artificial Sequence
  source: /note="Description of Artificial Sequence: Synthetic oligonucleotide"
  source: /note="Description of Combined DNA/RNA Molecule: Synthetic oligonucleotide"
  source: /note="DNA/RNA"
  source: /note="5' tri-ethylene glycol (TEG)"
  modified_base (1)..(1): bicyclic nucleic acid (BNA)
  modified_base (2)..(2): 5-methyl bicyclic nucleic acid
  modified_base (3)..(3): 5-methyl modified nucleotide
  modified_base (7)..(7): 5-methyl modified nucleotide
  modified_base (13)..(13): bicyclic nucleic acid (BNA)
  modified_base (14)..(14): bicyclic nucleic acid (BNA)
gccagucgguaagt

SEQ ID NO: 21183 - DNA, 20 bp, Artificial Sequence
  source: /note="Description of Artificial Sequence: Synthetic oligonucleotide"
  source: /note="Description of Combined DNA/RNA Molecule: Synthetic oligonucleotide"
  source: /note="DNA/RNA"
  source: /note="5' tri-ethylene glycol (TEG)"
  modified_base (1)..(1): bicyclic nucleic acid (BNA)
  modified_base (2)..(2): 5-methyl bicyclic nucleic acid
  modified_base (14)..(14): 5-methyl modified nucleotide
  modified_base (19)..(19): 5-methyl bicyclic nucleic acid
  modified_base (20)..(20): bicyclic nucleic acid (BNA)
tcaaggaagauggcauuuct

SEQ ID NO: 21184 - DNA, 22 bp, Artificial Sequence
  source: /note="Description of Artificial Sequence: Synthetic oligonucleotide"
  source: /note="Description of Combined DNA/RNA Molecule: Synthetic oligonucleotide"
  source: /note="DNA/RNA"
  source: /note="5' tri-ethylene glycol (TEG)"
  modified_base (1)..(1): bicyclic nucleic acid (BNA)
  modified_base (2)..(2): 5-methyl bicyclic nucleic acid
  modified_base (14)..(14): 5-methyl modified nucleotide
  modified_base (19)..(19): 5-methyl modified nucleotide
  modified_base (21)..(21): bicyclic nucleic acid (BNA)
  modified_base (22)..(22): bicyclic nucleic acid (BNA)
tcaaggaagauggcauuucuag

SEQ ID NO: 21185 - DNA, 16 bp, Artificial Sequence
  source: /note="Description of Artificial Sequence: Synthetic oligonucleotide"
  source: /note="Description of Combined DNA/RNA Molecule: Synthetic oligonucleotide"
  source: /note="DNA/RNA"
  source: /note="5' tri-ethylene glycol (TEG)"
  modified_base (1)..(1): bicyclic nucleic acid (BNA)
  modified_base (2)..(2): 5-methyl bicyclic nucleic acid
  modified_base (14)..(14): 5-methyl modified nucleotide
  modified_base (15)..(15): bicyclic nucleic acid (BNA)
  modified_base (16)..(16): bicyclic nucleic acid (BNA)
tcaaggaagauggcat

SEQ ID NO: 21186 - DNA, 15 bp, Artificial Sequence
  source: /note="Description of Artificial Sequence: Synthetic oligonucleotide"
  source: /note="Description of Combined DNA/RNA Molecule: Synthetic oligonucleotide"
  source: /note="DNA/RNA"
  source: /note="5' tri-ethylene glycol (TEG)"
  modified_base (1)..(1): bicyclic nucleic acid (BNA)
  modified_base (2)..(2): bicyclic nucleic acid (BNA)
  modified_base (9)..(9): 5-methyl modified nucleotide
  modified_base (14)..(14): 5-methyl bicyclic nucleic acid
  modified_base (15)..(15): bicyclic nucleic acid (BNA)
gaagauggcauuuct

SEQ ID NO: 21187 - DNA, 21 bp, Artificial Sequence
  source: /note="Description of Artificial Sequence: Synthetic oligonucleotide"
  source: /note="Description of Combined DNA/RNA Molecule: Synthetic oligonucleotide"
  source: /note="DNA/RNA"
  source: /note="5' tri-ethylene glycol (TEG)"
  modified_base (1)..(1): bicyclic nucleic acid (BNA)
  modified_base (2)..(2): 5-methyl bicyclic nucleic acid
  modified_base (14)..(14): 5-methyl modified nucleotide
  modified_base (19)..(19): 5-methyl modified nucleotide
  modified_base (20)..(20): bicyclic nucleic acid (BNA)
  modified_base (21)..(21): bicyclic nucleic acid (BNA)
tcaaggaagauggcauuucta

SEQ ID NO: 21188 - DNA, 19 bp, Artificial Sequence
  source: /note="Description of Artificial Sequence: Synthetic oligonucleotide"
  source: /note="Description of Combined DNA/RNA Molecule: Synthetic oligonucleotide"
  source: /note="DNA/RNA"
  source: /note="5' tri-ethylene glycol (TEG)"
  modified_base (1)..(1): bicyclic nucleic acid (BNA)
  modified_base (2)..(2): 5-methyl bicyclic nucleic acid
  modified_base (14)..(14): 5-methyl modified nucleotide
  modified_base (18)..(18): bicyclic nucleic acid (BNA)
  modified_base (19)..(19): 5-methyl bicyclic nucleic acid
tcaaggaagauggcauutc

SEQ ID NO: 21189 - DNA, 18 bp, Artificial Sequence
  source: /note="Description of Artificial Sequence: Synthetic oligonucleotide"
  source: /note="Description of Combined DNA/RNA Molecule: Synthetic oligonucleotide"
  source: /note="DNA/RNA"
  source: /note="5' tri-ethylene glycol (TEG)"
  modified_base (1)..(1): bicyclic nucleic acid (BNA)
  modified_base (2)..(2): 5-methyl bicyclic nucleic acid
  modified_base (14)..(14): 5-methyl modified nucleotide
  modified_base (17)..(17): bicyclic nucleic acid (BNA)
  modified_base (18)..(18): bicyclic nucleic acid (BNA)
tcaaggaagauggcautt

SEQ ID NO: 21190 - DNA, 17 bp, Artificial Sequence
  source: /note="Description of Artificial Sequence: Synthetic oligonucleotide"
  source: /note="Description of Combined DNA/RNA Molecule: Synthetic oligonucleotide"
  source: /note="DNA/RNA"
  source: /note="5' tri-ethylene glycol (TEG)"
  modified_base (1)..(1): bicyclic nucleic acid (BNA)
  modified_base (2)..(2): 5-methyl bicyclic nucleic acid
  modified_base (14)..(14): 5-methyl modified nucleotide
  modified_base (16)..(16): bicyclic nucleic acid (BNA)
  modified_base (17)..(17): bicyclic nucleic acid (BNA)
tcaaggaagauggcatt

SEQ ID NO: 21191 - DNA, 15 bp, Artificial Sequence
  source: /note="Description of Artificial Sequence: Synthetic oligonucleotide"
  source: /note="Description of Combined DNA/RNA Molecule: Synthetic oligonucleotide"
  source: /note="DNA/RNA"
  source: /note="5' tri-ethylene glycol (TEG)"
  modified_base (1)..(1): bicyclic nucleic acid (BNA)
  modified_base (2)..(2): 5-methyl bicyclic nucleic acid
  modified_base (14)..(14): 5-methyl bicyclic nucleic acid
  modified_base (15)..(15): bicyclic nucleic acid (BNA)
tcaaggaagauggca

SEQ ID NO: 21192 - DNA, 14 bp, Artificial Sequence
  source: /note="Description of Artificial Sequence: Synthetic oligonucleotide"
  source: /note="Description of Combined DNA/RNA Molecule: Synthetic oligonucleotide"
  source: /note="DNA/RNA"
  source: /note="5' tri-ethylene glycol (TEG)"
  modified_base (1)..(1): bicyclic nucleic acid (BNA)
  modified_base (2)..(2): 5-methyl bicyclic nucleic acid
  modified_base (13)..(13): bicyclic nucleic acid (BNA)
  modified_base (14)..(14): 5-methyl bicyclic nucleic acid
tcaaggaagauggc

SEQ ID NO: 21193 - DNA, 13 bp, Artificial Sequence
  source: /note="Description of Artificial Sequence: Synthetic oligonucleotide"
  source: /note="Description of Combined DNA/RNA Molecule: Synthetic oligonucleotide"
  source: /note="DNA/RNA"
  source: /note="5' tri-ethylene glycol (TEG)"
  modified_base (1)..(1): bicyclic nucleic acid (BNA)
  modified_base (2)..(2): 5-methyl bicyclic nucleic acid
  modified_base (12)..(12): bicyclic nucleic acid (BNA)
  modified_base (13)..(13): bicyclic nucleic acid (BNA)
tcaaggaagaugg

SEQ ID NO: 21194 - DNA, 12 bp, Artificial Sequence
  source: /note="Description of Artificial Sequence: Synthetic oligonucleotide"
  source: /note="DNA/RNA"
  source: /note="5' tri-ethylene glycol (TEG)"
  modified_base (1)..(1): bicyclic nucleic acid (BNA)
  modified_base (2)..(2): 5-methyl bicyclic nucleic acid
  modified_base (11)..(11): bicyclic nucleic acid (BNA)
  modified_base (12)..(12): bicyclic nucleic acid (BNA)
tcaaggaagatg

SEQ ID NO: 21195 - DNA, 11 bp, Artificial Sequence
  source: /note="Description of Artificial Sequence: Synthetic oligonucleotide"
  source: /note="DNA/RNA"
  source: /note="5' tri-ethylene glycol (TEG)"
  modified_base (1)..(1): bicyclic nucleic acid (BNA)
  modified_base (2)..(2): 5-methyl bicyclic nucleic acid
  modified_base (10)..(10): bicyclic nucleic acid (BNA)
  modified_base (11)..(11): bicyclic nucleic acid (BNA)
tcaaggaagat

SEQ ID NO: 21196 - DNA, 10 bp, Artificial Sequence
  source: /note="Description of Artificial Sequence: Synthetic oligonucleotide"
  source: /note="DNA/RNA"
  source: /note="5' tri-ethylene glycol (TEG)"
  modified_base (1)..(1): bicyclic nucleic acid (BNA)
  modified_base (2)..(2): 5-methyl bicyclic nucleic acid
  modified_base (9)..(9): bicyclic nucleic acid (BNA)
  modified_base (10)..(10): bicyclic nucleic acid (BNA)
tcaaggaaga

SEQ ID NO: 21197 - DNA, 9 bp, Artificial Sequence
  source: /note="Description of Artificial Sequence: Synthetic oligonucleotide"
  source: /note="DNA/RNA"
  source: /note="5' tri-ethylene glycol (TEG)"
  modified_base (1)..(1): bicyclic nucleic acid (BNA)
  modified_base (2)..(2): 5-methyl bicyclic nucleic acid
  modified_base (8)..(8): bicyclic nucleic acid (BNA)
  modified_base (9)..(9): bicyclic nucleic acid (BNA)
tcaaggaag

SEQ ID NO: 21198 - RNA, 21 nt, Artificial Sequence
  source: /note="Description of Artificial Sequence: Synthetic oligonucleotide"
  source: /note="RNA"
  source: /note="5' tri-ethylene glycol (TEG)"
  modified_base (1)..(1): 5-methyl bicyclic nucleic acid
  modified_base (2)..(2): bicyclic nucleic acid (BNA)
  modified_base (13)..(13): 5-methyl modified nucleotide
  modified_base (18)..(18): 5-methyl modified nucleotide
  modified_base (20)..(20): bicyclic nucleic acid (BNA)
  modified_base (21)..(21): bicyclic nucleic acid (BNA)
caaggaagauggcauuucuag

SEQ ID NO: 21199 - DNA, 20 bp, Artificial Sequence
  source: /note="Description of Artificial Sequence: Synthetic oligonucleotide"
  source: /note="Description of Combined DNA/RNA Molecule: Synthetic oligonucleotide"
  source: /note="DNA/RNA"
  source: /note="5' tri-ethylene glycol (TEG)"
  modified_base (1)..(1): 5-methyl bicyclic nucleic acid
  modified_base (2)..(2): bicyclic nucleic acid (BNA)
  modified_base (13)..(13): 5-methyl modified nucleotide
  modified_base (18)..(18): 5-methyl modified nucleotide
  modified_base (19)..(19): bicyclic nucleic acid (BNA)
  modified_base (20)..(20): bicyclic nucleic acid (BNA)
caaggaagauggcauuucta

SEQ ID NO: 21200 - DNA, 19 bp, Artificial Sequence
  source: /note="Description of Artificial Sequence: Synthetic oligonucleotide"
  source: /note="Description of Combined DNA/RNA Molecule: Synthetic oligonucleotide"
  source: /note="DNA/RNA"
  source: /note="5' tri-ethylene glycol (TEG)"
  modified_base (1)..(1): 5-methyl bicyclic nucleic acid
  modified_base (2)..(2): bicyclic nucleic acid (BNA)
  modified_base (13)..(13): 5-methyl modified nucleotide
  modified_base (18)..(18): 5-methyl bicyclic nucleic acid
  modified_base (19)..(19): bicyclic nucleic acid (BNA)
caaggaagauggcauuuct

SEQ ID NO: 21201 - DNA, 18 bp, Artificial Sequence
  source: /note="Description of Artificial Sequence: Synthetic oligonucleotide"
  source: /note="Description of Combined DNA/RNA Molecule: Synthetic oligonucleotide"
  source: /note="DNA/RNA"
  source: /note="5' tri-ethylene glycol (TEG)"
  modified_base (1)..(1): 5-methyl bicyclic nucleic acid
  modified_base (2)..(2): bicyclic nucleic acid (BNA)
  modified_base (13)..(13): 5-methyl modified nucleotide
  modified_base (17)..(17): bicyclic nucleic acid (BNA)
  modified_base (18)..(18): 5-methyl bicyclic nucleic acid
caaggaagauggcauutc

SEQ ID NO: 21202 - DNA, 17 bp, Artificial Sequence
  source: /note="Description of Artificial Sequence: Synthetic oligonucleotide"
  source: /note="Description of Combined DNA/RNA Molecule: Synthetic oligonucleotide"
  source: /note="DNA/RNA"
  source: /note="5' tri-ethylene glycol (TEG)"
  modified_base (1)..(1): 5-methyl bicyclic nucleic acid
  modified_base (2)..(2): bicyclic nucleic acid (BNA)
  modified_base (13)..(13): 5-methyl modified nucleotide
  modified_base (16)..(16): bicyclic nucleic acid (BNA)
  modified_base (17)..(17): bicyclic nucleic acid (BNA)
caaggaagauggcautt

SEQ ID NO: 21203 - DNA, 16 bp, Artificial Sequence
  source: /note="Description of Artificial Sequence: Synthetic oligonucleotide"
  source: /note="Description of Combined DNA/RNA Molecule: Synthetic oligonucleotide"
  source: /note="DNA/RNA"
  source: /note="5' tri-ethylene glycol (TEG)"
  modified_base (1)..(1): 5-methyl bicyclic nucleic acid
  modified_base (2)..(2): bicyclic nucleic acid (BNA)
  modified_base (13)..(13): 5-methyl modified nucleotide
  modified_base (15)..(15): bicyclic nucleic acid (BNA)
  modified_base (16)..(16): bicyclic nucleic acid (BNA)
caaggaagauggcatt

SEQ ID NO: 21204 - DNA, 15 bp, Artificial Sequence
  source: /note="Description of Artificial Sequence: Synthetic oligonucleotide"
  source: /note="Description of Combined DNA/RNA Molecule: Synthetic oligonucleotide"
  source: /note="DNA/RNA"
  source: /note="5' tri-ethylene glycol (TEG)"
  modified_base (1)..(1): 5-methyl bicyclic nucleic acid
  modified_base (2)..(2): bicyclic nucleic acid (BNA)
  modified_base (13)..(13): 5-methyl modified nucleotide
  modified_base (14)..(14): bicyclic nucleic acid (BNA)
  modified_base (15)..(15): bicyclic nucleic acid (BNA)
caaggaagauggcat

SEQ ID NO: 21205 - RNA, 14 nt, Artificial Sequence
  source: /note="Description of Artificial Sequence: Synthetic oligonucleotide"
  source: /note="RNA"
  source: /note="5' tri-ethylene glycol (TEG)"
  modified_base (1)..(1): 5-methyl bicyclic nucleic acid
  modified_base (2)..(2): bicyclic nucleic acid (BNA)
  modified_base (13)..(13): 5-methyl bicyclic nucleic acid
  modified_base (14)..(14): bicyclic nucleic acid (BNA)
caaggaagauggca

SEQ ID NO: 21206 - RNA, 13 nt, Artificial Sequence
  source: /note="Description of Artificial Sequence: Synthetic oligonucleotide"
  source: /note="RNA"
  source: /note="5' tri-ethylene glycol (TEG)"
  modified_base (1)..(1): 5-methyl bicyclic nucleic acid
  modified_base (2)..(2): bicyclic nucleic acid (BNA)
  modified_base (12)..(12): bicyclic nucleic acid (BNA)
  modified_base (13)..(13): 5-methyl bicyclic nucleic acid
caaggaagauggc

SEQ ID NO: 21207 - RNA, 12 nt, Artificial Sequence
  source: /note="Description of Artificial Sequence: Synthetic oligonucleotide"
  source: /note="RNA"
  source: /note="5' tri-ethylene glycol (TEG)"
  modified_base (1)..(1): 5-methyl bicyclic nucleic acid
  modified_base (2)..(2): bicyclic nucleic acid (BNA)
  modified_base (11)..(11): bicyclic nucleic acid (BNA)
  modified_base (12)..(12): bicyclic nucleic acid (BNA)
caaggaagaugg

SEQ ID NO: 21208 - DNA, 11 bp, Artificial Sequence
  source: /note="Description of Artificial Sequence: Synthetic oligonucleotide"
  source: /note="DNA/RNA"
  source: /note="5' tri-ethylene glycol (TEG)"
  modified_base (1)..(1): 5-methyl bicyclic nucleic acid
  modified_base (2)..(2): bicyclic nucleic acid (BNA)
  modified_base (10)..(10): bicyclic nucleic acid (BNA)
  modified_base (11)..(11): bicyclic nucleic acid (BNA)
caaggaagatg

SEQ ID NO: 21209 - DNA, 10 bp, Artificial Sequence
  source: /note="Description of Artificial Sequence: Synthetic oligonucleotide"
  source: /note="DNA/RNA"
  source: /note="5' tri-ethylene glycol (TEG)"
  modified_base (1)..(1): 5-methyl bicyclic nucleic acid
  modified_base (2)..(2): bicyclic nucleic acid (BNA)
  modified_base (9)..(9): bicyclic nucleic acid (BNA)
  modified_base (10)..(10): bicyclic nucleic acid (BNA)
caaggaagat

SEQ ID NO: 21210 - RNA, 9 nt, Artificial Sequence
  source: /note="Description of Artificial Sequence: Synthetic oligonucleotide"
  source: /note="RNA/Antisense Oligonucleotide"
  source: /note="5' tri-ethylene glycol (TEG)"
  modified_base (1)..(1): 5-methyl bicyclic nucleic acid
  modified_base (2)..(2): bicyclic nucleic acid (BNA)
  modified_base (8)..(8): bicyclic nucleic acid (BNA)
  modified_base (9)..(9): bicyclic nucleic acid (BNA)
caaggaaga

SEQ ID NO: 21211 - RNA, 8 nt, Artificial Sequence
  source: /note="Description of Artificial Sequence: Synthetic oligonucleotide"
  source: /note="RNA/Antisense Oligonucleotide"
  source: /note="5' tri-ethylene glycol (TEG)"
  modified_base (1)..(1): 5-methyl bicyclic nucleic acid
  modified_base (2)..(2): bicyclic nucleic acid (BNA)
  modified_base (7)..(7): bicyclic nucleic acid (BNA)
  modified_base (8)..(8): bicyclic nucleic acid (BNA)
caaggaag

SEQ ID NO: 21212 - RNA, 20 nt, Artificial Sequence
  source: /note="Description of Artificial Sequence: Synthetic oligonucleotide"
  source: /note="RNA"
  source: /note="5' tri-ethylene glycol (TEG)"
  modified_base (1)..(1): bicyclic nucleic acid (BNA)
  modified_base (2)..(2): bicyclic nucleic acid (BNA)
  modified_base (12)..(12): 5-methyl modified nucleotide
  modified_base (17)..(17): 5-methyl modified nucleotide
  modified_base (19)..(19): bicyclic nucleic acid (BNA)
  modified_base (20)..(20): bicyclic nucleic acid (BNA)
aaggaagauggcauuucuag

SEQ ID NO: 21213 - DNA, 19 bp, Artificial Sequence
  source: /note="Description of Artificial Sequence: Synthetic oligonucleotide"
  source: /note="Description of Combined DNA/RNA Molecule: Synthetic oligonucleotide"
  source: /note="DNA/RNA"
  source: /note="5' tri-ethylene glycol (TEG)"
  modified_base (1)..(1): bicyclic nucleic acid (BNA)
  modified_base (2)..(2): bicyclic nucleic acid (BNA)
  modified_base (12)..(12): 5-methyl modified nucleotide
  modified_base (17)..(17): 5-methyl modified nucleotide
  modified_base (18)..(18): bicyclic nucleic acid (BNA)
  modified_base (19)..(19): bicyclic nucleic acid (BNA)
aaggaagauggcauuucta

SEQ ID NO: 21214 - DNA, 18 bp, Artificial Sequence
  source: /note="Description of Artificial Sequence: Synthetic oligonucleotide"
  source: /note="Description of Combined DNA/RNA Molecule: Synthetic oligonucleotide"
  source: /note="DNA/RNA"
  source: /note="5' tri-ethylene glycol (TEG)"
  modified_base (1)..(1): bicyclic nucleic acid (BNA)
  modified_base (2)..(2): bicyclic nucleic acid (BNA)
  modified_base (12)..(12): 5-methyl modified nucleotide
  modified_base (17)..(17): 5-methyl bicyclic nucleic acid
  modified_base (18)..(18): bicyclic nucleic acid (BNA)
aaggaagauggcauuuct

SEQ ID NO: 21215 - DNA, 17 bp, Artificial Sequence
  source: /note="Description of Artificial Sequence: Synthetic oligonucleotide"
  source: /note="Description of Combined DNA/RNA Molecule: Synthetic oligonucleotide"
  source: /note="DNA/RNA"
  source: /note="5' tri-ethylene glycol (TEG)"
  modified_base (1)..(1): bicyclic nucleic acid (BNA)
  modified_base (2)..(2): bicyclic nucleic acid (BNA)
  modified_base (12)..(12): 5-methyl modified nucleotide
  modified_base (16)..(16): bicyclic nucleic acid (BNA)
  modified_base (17)..(17): 5-methyl bicyclic nucleic acid
aaggaagauggcauutc

SEQ ID NO: 21216 - DNA, 16 bp, Artificial Sequence
  source: /note="Description of Artificial Sequence: Synthetic oligonucleotide"
  source: /note="Description of Combined DNA/RNA Molecule: Synthetic oligonucleotide"
  source: /note="DNA/RNA"
  source: /note="5' tri-ethylene glycol (TEG)"
  modified_base (1)..(1): bicyclic nucleic acid (BNA)
  modified_base (2)..(2): bicyclic nucleic acid (BNA)
  modified_base (12)..(12): 5-methyl modified nucleotide
  modified_base (15)..(15): bicyclic nucleic acid (BNA)
  modified_base (16)..(16): bicyclic nucleic acid (BNA)
aaggaagauggcautt

SEQ ID NO: 21217 - DNA, 15 bp, Artificial Sequence
  source: /note="Description of Artificial Sequence: Synthetic oligonucleotide"
  source: /note="Description of Combined DNA/RNA Molecule: Synthetic oligonucleotide"
  source: /note="DNA/RNA"
  source: /note="5' tri-ethylene glycol (TEG)"
  modified_base (1)..(1): bicyclic nucleic acid (BNA)
  modified_base (2)..(2): bicyclic nucleic acid (BNA)
  modified_base (12)..(12): 5-methyl modified nucleotide
  modified_base (14)..(14): bicyclic nucleic acid (BNA)
  modified_base (15)..(15): bicyclic nucleic acid (BNA)
aaggaagauggcatt

SEQ ID NO: 21218 - DNA, 14 bp, Artificial Sequence
  source: /note="Description of Artificial Sequence: Synthetic oligonucleotide"
  source: /note="Description of Combined DNA/RNA Molecule: Synthetic oligonucleotide"
  source: /note="DNA/RNA"
  source: /note="5' tri-ethylene glycol (TEG)"
  modified_base (1)..(1): bicyclic nucleic acid (BNA)
  modified_base (2)..(2): bicyclic nucleic acid (BNA)
  modified_base (12)..(12): 5-methyl modified nucleotide
  modified_base (13)..(13): bicyclic nucleic acid (BNA)
  modified_base (14)..(14): bicyclic nucleic acid (BNA)
aaggaagauggcat

SEQ ID NO: 21219 - RNA, 13 nt, Artificial Sequence
  source: /note="Description of Artificial Sequence: Synthetic oligonucleotide"
  source: /note="RNA"
  source: /note="5' tri-ethylene glycol (TEG)"
  modified_base (1)..(1): bicyclic nucleic acid (BNA)
  modified_base (2)..(2): bicyclic nucleic acid (BNA)
  modified_base (12)..(12): 5-methyl bicyclic nucleic acid
  modified_base (13)..(13): bicyclic nucleic acid (BNA)
aaggaagauggca

SEQ ID NO: 21220 - RNA, 12 nt, Artificial Sequence
  source: /note="Description of Artificial Sequence: Synthetic oligonucleotide"
  source: /note="RNA"
  source: /note="5' tri-ethylene glycol (TEG)"
  modified_base (1)..(1): bicyclic nucleic acid (BNA)
  modified_base (2)..(2): bicyclic nucleic acid (BNA)
  modified_base (11)..(11): bicyclic nucleic acid (BNA)
  modified_base (12)..(12): 5-methyl bicyclic nucleic acid
aaggaagauggc

SEQ ID NO: 21221 - RNA, 11 nt, Artificial Sequence
  source: /note="Description of Artificial Sequence: Synthetic oligonucleotide"
  source: /note="RNA"
  source: /note="5' tri-ethylene glycol (TEG)"
  modified_base (1)..(1): bicyclic nucleic acid (BNA)
  modified_base (2)..(2): bicyclic nucleic acid (BNA)
  modified_base (10)..(10): bicyclic nucleic acid (BNA)
  modified_base (11)..(11): bicyclic nucleic acid (BNA)
aaggaagaugg

SEQ ID NO: 21222 - DNA, 10 bp, Artificial Sequence
  source: /note="Description of Artificial Sequence: Synthetic oligonucleotide"
  source: /note="DNA/RNA"
  source: /note="5' tri-ethylene glycol (TEG)"
  modified_base (1)..(1): bicyclic nucleic acid (BNA)
  modified_base (2)..(2): bicyclic nucleic acid (BNA)
  modified_base (9)..(9): bicyclic nucleic acid (BNA)
  modified_base (10)..(10): bicyclic nucleic acid (BNA)
aaggaagatg

SEQ ID NO: 21223 - DNA, 9 bp, Artificial Sequence
  source: /note="Description of Artificial Sequence: Synthetic oligonucleotide"
  source: /note="DNA/RNA"
  source: /note="5' tri-ethylene glycol (TEG)"
  modified_base (1)..(1): bicyclic nucleic acid (BNA)
  modified_base (2)..(2): bicyclic nucleic acid (BNA)
  modified_base (8)..(8): bicyclic nucleic acid (BNA)
  modified_base (9)..(9): bicyclic nucleic acid (BNA)
aaggaagat

SEQ ID NO: 21224 - RNA, 8 nt, Artificial Sequence
  source: /note="Description of Artificial Sequence: Synthetic oligonucleotide"
  source: /note="RNA/Antisense Oligonucleotide"
  source: /note="5' tri-ethylene glycol (TEG)"
  modified_base (1)..(1): bicyclic nucleic acid (BNA)
  modified_base (2)..(2): bicyclic nucleic acid (BNA)
  modified_base (7)..(7): bicyclic nucleic acid (BNA)
  modified_base (8)..(8): bicyclic nucleic acid (BNA)
aaggaaga

SEQ ID NO: 21225 - RNA, 19 nt, Artificial Sequence
  source: /note="Description of Artificial Sequence: Synthetic oligonucleotide"
  source: /note="RNA"
  source: /note="5' tri-ethylene glycol (TEG)"
  modified_base (1)..(1): bicyclic nucleic acid (BNA)
  modified_base (2)..(2): bicyclic nucleic acid (BNA)
  modified_base (11)..(11): 5-methyl modified nucleotide
  modified_base (16)..(16): 5-methyl modified nucleotide
  modified_base (18)..(18): bicyclic nucleic acid (BNA)
  modified_base (19)..(19): bicyclic nucleic acid (BNA)
aggaagauggcauuucuag

SEQ ID NO: 21226 - DNA, 18 bp, Artificial Sequence
  source: /note="Description of Artificial Sequence: Synthetic oligonucleotide"
  source: /note="Description of Combined DNA/RNA Molecule: Synthetic oligonucleotide"
  source: /note="DNA/RNA"
  source: /note="5' tri-ethylene glycol (TEG)"
  modified_base (1)..(1): bicyclic nucleic acid (BNA)
  modified_base (2)..(2): bicyclic nucleic acid (BNA)
  modified_base (11)..(11): 5-methyl modified nucleotide
  modified_base (16)..(16): 5-methyl modified nucleotide
  modified_base (17)..(17): bicyclic nucleic acid (BNA)
  modified_base (18)..(18): bicyclic nucleic acid (BNA)
aggaagauggcauuucta

SEQ ID NO: 21227 - DNA, 17 bp, Artificial Sequence
  source: /note="Description of Artificial Sequence: Synthetic oligonucleotide"
  source: /note="Description of Combined DNA/RNA Molecule: Synthetic oligonucleotide"
  source: /note="DNA/RNA"
  source: /note="5' tri-ethylene glycol (TEG)"
  modified_base (1)..(1): bicyclic nucleic acid (BNA)
  modified_base (2)..(2): bicyclic nucleic acid (BNA)
  modified_base (11)..(11): 5-methyl modified nucleotide
  modified_base (16)..(16): 5-methyl bicyclic nucleic acid
  modified_base (17)..(17): bicyclic nucleic acid (BNA)
aggaagauggcauuuct

SEQ ID NO: 21228 - DNA, 16 bp, Artificial Sequence
  source: /note="Description of Artificial Sequence: Synthetic oligonucleotide"
  source: /note="Description of Combined DNA/RNA Molecule: Synthetic oligonucleotide"
  source: /note="DNA/RNA"
  source: /note="5' tri-ethylene glycol (TEG)"
  modified_base (1)..(1): bicyclic nucleic acid (BNA)
  modified_base (2)..(2): bicyclic nucleic acid (BNA)
  modified_base (11)..(11): 5-methyl modified nucleotide
  modified_base (15)..(15): bicyclic nucleic acid (BNA)
  modified_base (16)..(16): 5-methyl bicyclic nucleic acid
aggaagauggcauutc

SEQ ID NO: 21229 - DNA, 15 bp, Artificial Sequence
  source: /note="Description of Artificial Sequence: Synthetic oligonucleotide"
  source: /note="Description of Combined DNA/RNA Molecule: Synthetic oligonucleotide"
  source: /note="DNA/RNA"
  source: /note="5' tri-ethylene glycol (TEG)"
  modified_base (1)..(1): bicyclic nucleic acid (BNA)
  modified_base (2)..(2): bicyclic nucleic acid (BNA)
  modified_base (11)..(11): 5-methyl modified nucleotide
  modified_base (14)..(14): bicyclic nucleic acid (BNA)
  modified_base (15)..(15): bicyclic nucleic acid (BNA)
aggaagauggcautt

SEQ ID NO: 21230 - DNA, 14 bp, Artificial Sequence
  source: /note="Description of Artificial Sequence: Synthetic oligonucleotide"
  source: /note="Description of Combined DNA/RNA Molecule: Synthetic oligonucleotide"
  source: /note="DNA/RNA"
  source: /note="5' tri-ethylene glycol (TEG)"
  modified_base (1)..(1): bicyclic nucleic acid (BNA)
  modified_base (2)..(2): bicyclic nucleic acid (BNA)
  modified_base (11)..(11): 5-methyl modified nucleotide
  modified_base (13)..(13): bicyclic nucleic acid (BNA)
  modified_base (14)..(14): bicyclic nucleic acid (BNA)
aggaagauggcatt

SEQ ID NO: 21231 - DNA, 13 bp, Artificial Sequence
  source: /note="Description of Artificial Sequence: Synthetic oligonucleotide"
  source: /note="Description of Combined DNA/RNA Molecule: Synthetic oligonucleotide"
  source: /note="DNA/RNA"
  source: /note="5' tri-ethylene glycol (TEG)"
  modified_base (1)..(1): bicyclic nucleic acid (BNA)
  modified_base (2)..(2): bicyclic nucleic acid (BNA)
  modified_base (11)..(11): 5-methyl modified nucleotide
  modified_base (12)..(12): bicyclic nucleic acid (BNA)
  modified_base (13)..(13): bicyclic nucleic acid (BNA)
aggaagauggcat

SEQ ID NO: 21232 - RNA, 12 nt, Artificial Sequence
  source: /note="Description of Artificial Sequence: Synthetic oligonucleotide"
  source: /note="RNA"
  source: /note="5' tri-ethylene glycol (TEG)"
  modified_base (1)..(1): bicyclic nucleic acid (BNA)
  modified_base (2)..(2): bicyclic nucleic acid (BNA)
  modified_base (11)..(11): 5-methyl bicyclic nucleic acid
  modified_base (12)..(12): bicyclic nucleic acid (BNA)
aggaagauggca

SEQ ID NO: 21233 - RNA, 10 nt, Artificial Sequence
  source: /note="Description of Artificial Sequence: Synthetic oligonucleotide"
  source: /note="RNA"
  source: /note="5' tri-ethylene glycol (TEG)"
  modified_base (1)..(1): bicyclic nucleic acid (BNA)
  modified_base (2)..(2): bicyclic nucleic acid (BNA)
  modified_base (9)..(9): bicyclic nucleic acid (BNA)
  modified_base (10)..(10): bicyclic nucleic acid (BNA)
aggaagaugg

SEQ ID NO: 21234 - DNA, 9 bp, Artificial Sequence
  source: /note="Description of Artificial Sequence: Synthetic oligonucleotide"
  source: /note="DNA/RNA"
  source: /note="5' tri-ethylene glycol (TEG)"
  modified_base (1)..(1): bicyclic nucleic acid (BNA)
  modified_base (2)..(2): bicyclic nucleic acid (BNA)
  modified_base (8)..(8): bicyclic nucleic acid (BNA)
  modified_base (9)..(9): bicyclic nucleic acid (BNA)
aggaagatg

SEQ ID NO: 21235 - DNA, 8 bp, Artificial Sequence
  source: /note="Description of Artificial Sequence: Synthetic oligonucleotide"
  source: /note="DNA/RNA"
  source: /note="5' tri-ethylene glycol (TEG)"
  modified_base (1)..(1): bicyclic nucleic acid (BNA)
  modified_base (2)..(2): bicyclic nucleic acid (BNA)
  modified_base (7)..(7): bicyclic nucleic acid (BNA)
  modified_base (8)..(8): bicyclic nucleic acid (BNA)
aggaagat

SEQ ID NO: 21236 - RNA, 18 nt, Artificial Sequence
  source: /note="Description of Artificial Sequence: Synthetic oligonucleotide"
  source: /note="RNA"
  source: /note="5' tri-ethylene glycol (TEG)"
  modified_base (1)..(1): bicyclic nucleic acid (BNA)
  modified_base (2)..(2): bicyclic nucleic acid (BNA)
  modified_base (10)..(10): 5-methyl modified nucleotide
  modified_base (15)..(15): 5-methyl modified nucleotide
  modified_base (17)..(17): bicyclic nucleic acid (BNA)
  modified_base (18)..(18): bicyclic nucleic acid (BNA)
ggaagauggcauuucuag

SEQ ID NO: 21237 - DNA, 17 bp, Artificial Sequence
  source: /note="Description of Artificial Sequence: Synthetic oligonucleotide"
  source: /note="Description of Combined DNA/RNA Molecule: Synthetic oligonucleotide"
  source: /note="DNA/RNA"
  source: /note="5' tri-ethylene glycol (TEG)"
  modified_base (1)..(1): bicyclic nucleic acid (BNA)
  modified_base (2)..(2): bicyclic nucleic acid (BNA)
  modified_base (10)..(10): 5-methyl modified nucleotide
  modified_base (15)..(15): 5-methyl modified nucleotide
  modified_base (16)..(16): bicyclic nucleic acid (BNA)
  modified_base (17)..(17): bicyclic nucleic acid (BNA)
ggaagauggcauuucta

SEQ ID NO: 21238 - DNA, 16 bp, Artificial Sequence
  source: /note="Description of Artificial Sequence: Synthetic oligonucleotide"
  source: /note="Description of Combined DNA/RNA Molecule: Synthetic oligonucleotide"
  source: /note="DNA/RNA"
  source: /note="5' tri-ethylene glycol (TEG)"
  modified_base (1)..(1): bicyclic nucleic acid (BNA)
  modified_base (2)..(2): bicyclic nucleic acid (BNA)
  modified_base (10)..(10): 5-methyl modified nucleotide
  modified_base (15)..(15): 5-methyl bicyclic nucleic acid
  modified_base (16)..(16): bicyclic nucleic acid (BNA)
ggaagauggcauuuct

SEQ ID NO: 21239 - DNA, 15 bp, Artificial Sequence
  source: /note="Description of Artificial Sequence: Synthetic oligonucleotide"
  source: /note="Description of Combined DNA/RNA Molecule: Synthetic oligonucleotide"
  source: /note="DNA/RNA"
  source: /note="5' tri-ethylene glycol (TEG)"
  modified_base (1)..(1): bicyclic nucleic acid (BNA)
  modified_base (2)..(2): bicyclic nucleic acid (BNA)
  modified_base (10)..(10): 5-methyl modified nucleotide
  modified_base (14)..(14): bicyclic nucleic acid (BNA)
  modified_base (15)..(15): 5-methyl bicyclic nucleic acid
ggaagauggcauutc

SEQ ID NO: 21240 - DNA, 14 bp, Artificial Sequence
  source: /note="Description of Artificial Sequence: Synthetic oligonucleotide"
  source: /note="Description of Combined DNA/RNA Molecule: Synthetic oligonucleotide"
  source: /note="DNA/RNA"
  source: /note="5' tri-ethylene glycol (TEG)"
  modified_base (1)..(1): bicyclic nucleic acid (BNA)
  modified_base (2)..(2): bicyclic nucleic acid (BNA)
  modified_base (10)..(10): 5-methyl modified nucleotide
  modified_base (13)..(13): bicyclic nucleic acid (BNA)
  modified_base (14)..(14): bicyclic nucleic acid (BNA)
ggaagauggcautt

SEQ ID NO: 21241 - DNA, 13 bp, Artificial Sequence
  source: /note="Description of Artificial Sequence: Synthetic oligonucleotide"
  source: /note="Description of Combined DNA/RNA Molecule: Synthetic oligonucleotide"
  source: /note="DNA/RNA"
  source: /note="5' tri-ethylene glycol (TEG)"
  modified_base (1)..(1): bicyclic nucleic acid (BNA)
  modified_base (2)..(2): bicyclic nucleic acid (BNA)
  modified_base (10)..(10): 5-methyl modified nucleotide
  modified_base (12)..(12): bicyclic nucleic acid (BNA)
  modified_base (13)..(13): bicyclic nucleic acid (BNA)
ggaagauggcatt

SEQ ID NO: 21242 - DNA, 12 bp, Artificial Sequence
  source: /note="Description of Artificial Sequence: Synthetic oligonucleotide"
  source: /note="Description of Combined DNA/RNA Molecule: Synthetic oligonucleotide"
  source: /note="DNA/RNA"
  source: /note="5' tri-ethylene glycol (TEG)"
  modified_base (1)..(1): bicyclic nucleic acid (BNA)
  modified_base (2)..(2): bicyclic nucleic acid (BNA)
  modified_base (10)..(10): 5-methyl modified nucleotide
  modified_base (11)..(11): bicyclic nucleic acid (BNA)
  modified_base (12)..(12): bicyclic nucleic acid (BNA)
ggaagauggcat

SEQ ID NO: 21243 - RNA, 11 nt, Artificial Sequence
  source: /note="Description of Artificial Sequence: Synthetic oligonucleotide"
  source: /note="RNA"
  source: /note="5' tri-ethylene glycol (TEG)"
  modified_base (1)..(1): bicyclic nucleic acid (BNA)
  modified_base (2)..(2): bicyclic nucleic acid (BNA)
  modified_base (10)..(10): 5-methyl bicyclic nucleic acid
  modified_base (11)..(11): bicyclic nucleic acid (BNA)
ggaagauggca

SEQ ID NO: 21244 - RNA, 10 nt, Artificial Sequence
  source: /note="Description of Artificial Sequence: Synthetic oligonucleotide"
  source: /note="RNA"
  source: /note="5' tri-ethylene glycol (TEG)"
  modified_base (1)..(1): bicyclic nucleic acid (BNA)
  modified_base (2)..(2): bicyclic nucleic acid (BNA)
  modified_base (9)..(9): bicyclic nucleic acid (BNA)
  modified_base (10)..(10): 5-methyl bicyclic nucleic acid
ggaagauggc

SEQ ID NO: 21245 - DNA, 8 bp, Artificial Sequence
  source: /note="Description of Artificial Sequence: Synthetic oligonucleotide"
  source: /note="DNA/RNA"
  source: /note="5' tri-ethylene glycol (TEG)"
  modified_base (1)..(1): bicyclic nucleic acid (BNA)
  modified_base (2)..(2): bicyclic nucleic acid (BNA)
  modified_base (7)..(7): bicyclic nucleic acid (BNA)
  modified_base (8)..(8): bicyclic nucleic acid (BNA)
ggaagatg

SEQ ID NO: 21246 - RNA, 17 nt, Artificial Sequence
  source: /note="Description of Artificial Sequence: Synthetic oligonucleotide"
  source: /note="RNA"
  source: /note="5' tri-ethylene glycol (TEG)"
  modified_base (1)..(1): bicyclic nucleic acid (BNA)
  modified_base (2)..(2): bicyclic nucleic acid (BNA)
  modified_base (9)..(9): 5-methyl modified nucleotide
  modified_base (14)..(14): 5-methyl modified nucleotide
  modified_base (16)..(16): bicyclic nucleic acid (BNA)
  modified_base (17)..(17): bicyclic nucleic acid (BNA)
gaagauggcauuucuag

SEQ ID NO: 21247 - DNA, 16 bp, Artificial Sequence
  source: /note="Description of Artificial Sequence: Synthetic oligonucleotide"
  source: /note="Description of Combined DNA/RNA Molecule: Synthetic oligonucleotide"
  source: /note="DNA/RNA"
  source: /note="5' tri-ethylene glycol (TEG)"
  modified_base (1)..(1): bicyclic nucleic acid (BNA)
  modified_base (2)..(2): bicyclic nucleic acid (BNA)
  modified_base (9)..(9): 5-methyl modified nucleotide
  modified_base (14)..(14): 5-methyl modified nucleotide
  modified_base (15)..(15): bicyclic nucleic acid (BNA)
  modified_base (16)..(16): bicyclic nucleic acid (BNA)
gaagauggcauuucta

SEQ ID NO: 21248 - DNA, 14 bp, Artificial Sequence
  source: /note="Description of Artificial Sequence: Synthetic oligonucleotide"
  source: /note="Description of Combined DNA/RNA Molecule: Synthetic oligonucleotide"
  source: /note="DNA/RNA"
  source: /note="5' tri-ethylene glycol (TEG)"
  modified_base (1)..(1): bicyclic nucleic acid (BNA)
  modified_base (2)..(2): bicyclic nucleic acid (BNA)
  modified_base (9)..(9): 5-methyl modified nucleotide
  modified_base (13)..(13): bicyclic nucleic acid (BNA)
  modified_base (14)..(14): 5-methyl bicyclic nucleic acid
gaagauggcauutc

SEQ ID NO: 21249 - DNA, 13 bp, Artificial Sequence
  source: /note="Description of Artificial Sequence: Synthetic oligonucleotide"
  source: /note="Description of Combined DNA/RNA Molecule: Synthetic oligonucleotide"
  source: /note="DNA/RNA"
  source: /note="5' tri-ethylene glycol (TEG)"
  modified_base (1)..(1): bicyclic nucleic acid (BNA)
  modified_base (2)..(2): bicyclic nucleic acid (BNA)
  modified_base (9)..(9): 5-methyl modified nucleotide
  modified_base (12)..(12): bicyclic nucleic acid (BNA)
  modified_base (13)..(13): bicyclic nucleic acid (BNA)
gaagauggcautt

SEQ ID NO: 21250 - DNA, 12 bp, Artificial Sequence
  source: /note="Description of Artificial Sequence: Synthetic oligonucleotide"
  source: /note="Description of Combined DNA/RNA Molecule: Synthetic oligonucleotide"
  source: /note="DNA/RNA"
  source: /note="5' tri-ethylene glycol (TEG)"
  modified_base (1)..(1): bicyclic nucleic acid (BNA)
  modified_base (2)..(2): bicyclic nucleic acid (BNA)
  modified_base (9)..(9): 5-methyl modified nucleotide
  modified_base (11)..(11): bicyclic nucleic acid (BNA)
  modified_base (12)..(12): bicyclic nucleic acid (BNA)
gaagauggcatt

SEQ ID NO: 21251 - DNA, 11 bp, Artificial Sequence
  source: /note="Description of Artificial Sequence: Synthetic oligonucleotide"
  source: /note="Description of Combined DNA/RNA Molecule: Synthetic oligonucleotide"
  source: /note="DNA/RNA"
  source: /note="5' tri-ethylene glycol (TEG)"
  modified_base (1)..(1): bicyclic nucleic acid (BNA)
  modified_base (2)..(2): bicyclic nucleic acid (BNA)
  modified_base (9)..(9): 5-methyl modified nucleotide
  modified_base (10)..(10): bicyclic nucleic acid (BNA)
  modified_base (11)..(11): bicyclic nucleic acid (BNA)
gaagauggcat

SEQ ID NO: 21252 - RNA, 10 nt, Artificial Sequence
  source: /note="Description of Artificial Sequence: Synthetic oligonucleotide"
  source: /note="RNA"
  source: /note="5' tri-ethylene glycol (TEG)"
  modified_base (1)..(1): bicyclic nucleic acid (BNA)
  modified_base (2)..(2): bicyclic nucleic acid (BNA)
  modified_base (9)..(9): 5-methyl bicyclic nucleic acid
  modified_base (10)..(10): bicyclic nucleic acid (BNA)
gaagauggca

SEQ ID NO: 21253 - RNA, 9 nt, Artificial Sequence
  source: /note="Description of Artificial Sequence: Synthetic oligonucleotide"
  source: /note="RNA"
  source: /note="5' tri-ethylene glycol (TEG)"
  modified_base (1)..(1): bicyclic nucleic acid (BNA)
  modified_base (2)..(2): bicyclic nucleic acid (BNA)
  modified_base (8)..(8): bicyclic nucleic acid (BNA)
  modified_base (9)..(9): 5-methyl bicyclic nucleic acid
gaagauggc

SEQ ID NO: 21254 - RNA, 8 nt, Artificial Sequence
  source: /note="Description of Artificial Sequence: Synthetic oligonucleotide"
  source: /note="RNA"
  source: /note="5' tri-ethylene glycol (TEG)"
  modified_base (1)..(1): bicyclic nucleic acid (BNA)
  modified_base (2)..(2): bicyclic nucleic acid (BNA)
  modified_base (7)..(7): bicyclic nucleic acid (BNA)
  modified_base (8)..(8): bicyclic nucleic acid (BNA)
gaagaugg

SEQ ID NO: 21255 - RNA, 16 nt, Artificial Sequence
  source: /note="Description of Artificial Sequence: Synthetic oligonucleotide"
  source: /note="RNA"
  source: /note="5' tri-ethylene glycol (TEG)"
  modified_base (1)..(1): bicyclic nucleic acid (BNA)
  modified_base (2)..(2): bicyclic nucleic acid (BNA)
  modified_base (8)..(8): 5-methyl modified nucleotide
  modified_base (13)..(13): 5-methyl modified nucleotide
  modified_base (15)..(15): bicyclic nucleic acid (BNA)
  modified_base (16)..(16): bicyclic nucleic acid (BNA)
aagauggcauuucuag

SEQ ID NO: 21256 - DNA, 15 bp, Artificial Sequence
  source: /note="Description of Artificial Sequence: Synthetic oligonucleotide"
  source: /note="Description of Combined DNA/RNA Molecule: Synthetic oligonucleotide"
  source: /note="DNA/RNA"
  source: /note="5' tri-ethylene glycol (TEG)"
  modified_base (1)..(1): bicyclic nucleic acid (BNA)
  modified_base (2)..(2): bicyclic nucleic acid (BNA)
  modified_base (8)..(8): 5-methyl modified nucleotide
  modified_base (13)..(13): 5-methyl modified nucleotide
  modified_base (14)..(14): bicyclic nucleic acid (BNA)
  modified_base (15)..(15): bicyclic nucleic acid (BNA)
aagauggcauuucta

SEQ ID NO: 21257 - DNA, 14 bp, Artificial Sequence
  source: /note="Description of Artificial Sequence: Synthetic oligonucleotide"
  source: /note="Description of Combined DNA/RNA Molecule: Synthetic oligonucleotide"
  source: /note="DNA/RNA"
  source: /note="5' tri-ethylene glycol (TEG)"
  modified_base (1)..(1): bicyclic nucleic acid (BNA)
  modified_base (2)..(2): bicyclic nucleic acid (BNA)
  modified_base (8)..(8): 5-methyl modified nucleotide
  modified_base (13)..(13): 5-methyl bicyclic nucleic acid
  modified_base (14)..(14): bicyclic nucleic acid (BNA)
aagauggcauuuct

SEQ ID NO: 21258 - DNA, 13 bp, Artificial Sequence
  source: /note="Description of Artificial Sequence: Synthetic oligonucleotide"
  source: /note="Description of Combined DNA/RNA Molecule: Synthetic oligonucleotide"
  source: /note="DNA/RNA"
  source: /note="5' tri-ethylene glycol (TEG)"
  modified_base (1)..(1): bicyclic nucleic acid (BNA)
  modified_base (2)..(2): bicyclic nucleic acid (BNA)
  modified_base (8)..(8): 5-methyl modified nucleotide
  modified_base (12)..(12): bicyclic nucleic acid (BNA)
  modified_base (13)..(13): 5-methyl bicyclic nucleic acid
aagauggcauutc

SEQ ID NO: 21259 - DNA, 12 bp, Artificial Sequence
  source: /note="Description of Artificial Sequence: Synthetic oligonucleotide"
  source: /note="Description of Combined DNA/RNA Molecule: Synthetic oligonucleotide"
  source: /note="DNA/RNA"
  source: /note="5' tri-ethylene glycol (TEG)"
  modified_base (1)..(1): bicyclic nucleic acid (BNA)
  modified_base (2)..(2): bicyclic nucleic acid (BNA)
  modified_base (8)..(8): 5-methyl modified nucleotide
  modified_base (11)..(11): bicyclic nucleic acid (BNA)
  modified_base (12)..(12): bicyclic nucleic acid (BNA)
aagauggcautt

SEQ ID NO: 21260 - DNA, 11 bp, Artificial Sequence
  source: /note="Description of Artificial Sequence: Synthetic oligonucleotide"
  source: /note="Description of Combined DNA/RNA Molecule: Synthetic oligonucleotide"
  source: /note="DNA/RNA"
  source: /note="5' tri-ethylene glycol (TEG)"
  modified_base (1)..(1): bicyclic nucleic acid (BNA)
  modified_base (2)..(2): bicyclic nucleic acid (BNA)
  modified_base (8)..(8): 5-methyl modified nucleotide
  modified_base (10)..(10): bicyclic nucleic acid (BNA)
  modified_base (11)..(11): bicyclic nucleic acid (BNA)
aagauggcatt

SEQ ID NO: 21261 - DNA, 10 bp, Artificial Sequence
  source: /note="Description of Artificial Sequence: Synthetic oligonucleotide"
  source: /note="Description of Combined DNA/RNA Molecule: Synthetic oligonucleotide"
  source: /note="DNA/RNA"
  source: /note="5' tri-ethylene glycol (TEG)"
  modified_base (1)..(1): bicyclic nucleic acid (BNA)
  modified_base (2)..(2): bicyclic nucleic acid (BNA)
  modified_base (8)..(8): 5-methyl modified nucleotide
  modified_base (9)..(9): bicyclic nucleic acid (BNA)
  modified_base (10)..(10): bicyclic nucleic acid (BNA)
aagauggcat

SEQ ID NO: 21262 - RNA, 9 nt, Artificial Sequence
  source: /note="Description of Artificial Sequence: Synthetic oligonucleotide"
  source: /note="RNA"
  source: /note="5' tri-ethylene glycol (TEG)"
  modified_base (1)..(1): bicyclic nucleic acid (BNA)
  modified_base (2)..(2): bicyclic nucleic acid (BNA)
  modified_base (8)..(8): 5-methyl bicyclic nucleic acid
  modified_base (9)..(9): bicyclic nucleic acid (BNA)
aagauggca

SEQ ID NO: 21263 - RNA, 8 nt, Artificial Sequence
  source: /note="Description of Artificial Sequence: Synthetic oligonucleotide"
  source: /note="RNA"
  source: /note="5' tri-ethylene glycol (TEG)"
  modified_base (1)..(1): bicyclic nucleic acid (BNA)
  modified_base (2)..(2): bicyclic nucleic acid (BNA)
  modified_base (7)..(7): bicyclic nucleic acid (BNA)
  modified_base (8)..(8): 5-methyl bicyclic nucleic acid
aagauggc

SEQ ID NO: 21264 - RNA, 15 nt, Artificial Sequence
  source: /note="Description of Artificial Sequence: Synthetic oligonucleotide"
  source: /note="RNA"
  source: /note="5' tri-ethylene glycol (TEG)"
  modified_base (1)..(1): bicyclic nucleic acid (BNA)
  modified_base (2)..(2): bicyclic nucleic acid (BNA)
  modified_base (7)..(7): 5-methyl modified nucleotide
  modified_base (12)..(12): 5-methyl modified nucleotide
  modified_base (14)..(14): bicyclic nucleic acid (BNA)
  modified_base (15)..(15): bicyclic nucleic acid (BNA)
agauggcauuucuag

SEQ ID NO: 21265 - DNA, 14 bp, Artificial Sequence
  source: /note="Description of Artificial Sequence: Synthetic oligonucleotide"
  source: /note="Description of Combined DNA/RNA Molecule: Synthetic oligonucleotide"
  source: /note="DNA/RNA"
  source: /note="5' tri-ethylene glycol (TEG)"
  modified_base (1)..(1): bicyclic nucleic acid (BNA)
  modified_base (2)..(2): bicyclic nucleic acid (BNA)
  modified_base (7)..(7): 5-methyl modified nucleotide
  modified_base (12)..(12): 5-methyl modified nucleotide
  modified_base (13)..(13): bicyclic nucleic acid (BNA)
  modified_base (14)..(14): bicyclic nucleic acid (BNA)
agauggcauuucta

SEQ ID NO: 21266 - DNA, 13 bp, Artificial Sequence
  source: /note="Description of Artificial Sequence: Synthetic oligonucleotide"
  source: /note="Description of Combined DNA/RNA Molecule: Synthetic oligonucleotide"
  source: /note="DNA/RNA"
  source: /note="5' tri-ethylene glycol (TEG)"
  modified_base (1)..(1): bicyclic nucleic acid (BNA)
  modified_base (2)..(2): bicyclic nucleic acid (BNA)
  modified_base (7)..(7): 5-methyl modified nucleotide
  modified_base (12)..(12): 5-methyl bicyclic nucleic acid
  modified_base (13)..(13): bicyclic nucleic acid (BNA)
agauggcauuuct

SEQ ID NO: 21267 - DNA, 12 bp, Artificial Sequence
  source: /note="Description of Artificial Sequence: Synthetic oligonucleotide"
  source: /note="Description of Combined DNA/RNA Molecule: Synthetic oligonucleotide"
  source: /note="DNA/RNA"
  source: /note="5' tri-ethylene glycol (TEG)"
  modified_base (1)..(1): bicyclic nucleic acid (BNA)
  modified_base (2)..(2): bicyclic nucleic acid (BNA)
  modified_base (7)..(7): 5-methyl modified nucleotide
  modified_base (11)..(11): bicyclic nucleic acid (BNA)
  modified_base (12)..(12): 5-methyl bicyclic nucleic acid
agauggcauutc

SEQ ID NO: 21268 - DNA, 11 bp, Artificial Sequence
  source: /note="Description of Artificial Sequence: Synthetic oligonucleotide"
  source: /note="Description of Combined DNA/RNA Molecule: Synthetic oligonucleotide"
  source: /note="DNA/RNA"
  source: /note="5' tri-ethylene glycol (TEG)"
  modified_base (1)..(1): bicyclic nucleic acid (BNA)
  modified_base (2)..(2): bicyclic nucleic acid (BNA)
  modified_base (7)..(7): 5-methyl modified nucleotide
  modified_base (10)..(10): bicyclic nucleic acid (BNA)
  modified_base (11)..(11): bicyclic nucleic acid (BNA)
agauggcautt

SEQ ID NO: 21269 - DNA, 10 bp, Artificial Sequence
  source: /note="Description of Artificial Sequence: Synthetic oligonucleotide"
  source: /note="Description of Combined DNA/RNA Molecule: Synthetic oligonucleotide"
  source: /note="DNA/RNA"
  source: /note="5' tri-ethylene glycol (TEG)"
  modified_base (1)..(1): bicyclic nucleic acid (BNA)
  modified_base (2)..(2): bicyclic nucleic acid (BNA)
  modified_base (7)..(7): 5-methyl modified nucleotide
  modified_base (9)..(9): bicyclic nucleic acid (BNA)
  modified_base (10)..(10): bicyclic nucleic acid (BNA)
agauggcatt

SEQ ID NO: 21270 - DNA, 9 bp, Artificial Sequence
  source: /note="Description of Artificial Sequence: Synthetic oligonucleotide"
  source: /note="Description of Combined DNA/RNA Molecule: Synthetic oligonucleotide"
  source: /note="DNA/RNA"
  source: /note="5' tri-ethylene glycol (TEG)"
  modified_base (1)..(1): bicyclic nucleic acid (BNA)
  modified_base (2)..(2): bicyclic nucleic acid (BNA)
  modified_base (7)..(7): 5-methyl modified nucleotide
  modified_base (8)..(8): bicyclic nucleic acid (BNA)
  modified_base (9)..(9): bicyclic nucleic acid (BNA)
agauggcat

SEQ ID NO: 21271 - RNA, 8 nt, Artificial Sequence
  source: /note="Description of Artificial Sequence: Synthetic oligonucleotide"
  source: /note="RNA"
  source: /note="5' tri-ethylene glycol (TEG)"
  modified_base (1)..(1): bicyclic nucleic acid (BNA)
  modified_base (2)..(2): bicyclic nucleic acid (BNA)
  modified_base (7)..(7): 5-methyl bicyclic nucleic acid
  modified_base (8)..(8): bicyclic nucleic acid (BNA)
agauggca

SEQ ID NO: 21272 - DNA, 30 bp, Artificial Sequence; identical to SEQ ID NO: 8204
  source: /note="Description of Artificial Sequence: Synthetic oligonucleotide"
  source: /note="Description of Combined DNA/RNA Molecule: Synthetic oligonucleotide"
  source: /note="DNA/RNA"
  source: /note="5' tri-ethylene glycol (TEG)"
  modified_base (1)..(1): 5-methyl bicyclic nucleic acid
  modified_base (2)..(2): bicyclic nucleic acid (BNA)
  modified_base (3)..(3): 5-methyl modified nucleotide
  modified_base (4)..(4): 5-methyl modified nucleotide
  modified_base (7)..(7): 5-methyl modified nucleotide
  modified_base (10)..(10): 5-methyl modified nucleotide
  modified_base (22)..(22): 5-methyl modified nucleotide
  modified_base (27)..(27): 5-methyl modified nucleotide
  modified_base (29)..(29): bicyclic nucleic acid (BNA)
  modified_base (30)..(30): bicyclic nucleic acid (BNA)

SEQ ID NO: 21273 - DNA, 29 bp, Artificial Sequence
  source: /note="Description of Artificial Sequence: Synthetic oligonucleotide"
  source: /note="Description of Combined DNA/RNA Molecule: Synthetic oligonucleotide"
  source: /note="DNA/RNA"
  source: /note="5' tri-ethylene glycol (TEG)"
  modified_base (1)..(1): 5-methyl bicyclic nucleic acid
  modified_base (2)..(2): bicyclic nucleic acid (BNA)
  modified_base (3)..(3): 5-methyl modified nucleotide
  modified_base (4)..(4): 5-methyl modified nucleotide
  modified_base (7)..(7): 5-methyl modified nucleotide
  modified_base (10)..(10): 5-methyl modified nucleotide
  modified_base (22)..(22): 5-methyl modified nucleotide
  modified_base (27)..(27): 5-methyl modified nucleotide
  modified_base (28)..(28): bicyclic nucleic acid (BNA)
  modified_base (29)..(29): bicyclic nucleic acid (BNA)
ctccaacaucaaggaagauggcauuucta

SEQ ID NO: 21274 - DNA, 28 bp, Artificial Sequence
  source: /note="Description of Artificial Sequence: Synthetic oligonucleotide"
  source: /note="Description of Combined DNA/RNA Molecule: Synthetic oligonucleotide"
  source: /note="DNA/RNA"
  source: /note="5' tri-ethylene glycol (TEG)"
  modified_base (1)..(1): 5-methyl bicyclic nucleic acid
  modified_base (2)..(2): bicyclic nucleic acid (BNA)
  modified_base (3)..(3): 5-methyl modified nucleotide
  modified_base (4)..(4): 5-methyl modified nucleotide
  modified_base (7)..(7): 5-methyl modified nucleotide
  modified_base (10)..(10): 5-methyl modified nucleotide
  modified_base (22)..(22): 5-methyl modified nucleotide
  modified_base (27)..(27): 5-methyl bicyclic nucleic acid
  modified_base (28)..(28): bicyclic nucleic acid (BNA)
ctccaacaucaaggaagauggcauuuct

SEQ ID NO: 21275 - DNA, 27 bp, Artificial Sequence
  source: /note="Description of Artificial Sequence: Synthetic oligonucleotide"
  source: /note="Description of Combined DNA/RNA Molecule: Synthetic oligonucleotide"
  source: /note="DNA/RNA"
  source: /note="5' tri-ethylene glycol (TEG)"
  modified_base (1)..(1): 5-methyl bicyclic nucleic acid
  modified_base (2)..(2): bicyclic nucleic acid (BNA)
  modified_base (3)..(3): 5-methyl modified nucleotide
  modified_base (4)..(4): 5-methyl modified nucleotide
  modified_base (7)..(7): 5-methyl modified nucleotide
  modified_base (10)..(10): 5-methyl modified nucleotide
  modified_base (22)..(22): 5-methyl modified nucleotide
  modified_base (26)..(26): bicyclic nucleic acid (BNA)
  modified_base (27)..(27): 5-methyl bicyclic nucleic acid
ctccaacaucaaggaagauggcauutc

SEQ ID NO: 21276 - DNA, 26 bp, Artificial Sequence
  source: /note="Description of Artificial Sequence: Synthetic oligonucleotide"
  source: /note="Description of Combined DNA/RNA Molecule: Synthetic oligonucleotide"
  source: /note="DNA/RNA"
  source: /note="5' tri-ethylene glycol (TEG)"
  modified_base (1)..(1): 5-methyl bicyclic nucleic acid
  modified_base (2)..(2): bicyclic nucleic acid (BNA)
  modified_base (3)..(3): 5-methyl modified nucleotide
  modified_base (4)..(4): 5-methyl modified nucleotide
  modified_base (7)..(7): 5-methyl modified nucleotide
  modified_base (10)..(10): 5-methyl modified nucleotide
  modified_base (22)..(22): 5-methyl modified nucleotide
  modified_base (25)..(25): bicyclic nucleic acid (BNA)
  modified_base (26)..(26): bicyclic nucleic acid (BNA)
ctccaacaucaaggaagauggcautt

SEQ ID NO: 21277 - DNA, 25 bp, Artificial Sequence
  source: /note="Description of Artificial Sequence: Synthetic oligonucleotide"
  source: /note="Description of Combined DNA/RNA Molecule: Synthetic oligonucleotide"
  source: /note="DNA/RNA"
  source: /note="5' tri-ethylene glycol (TEG)"
  modified_base (1)..(1): 5-methyl bicyclic nucleic acid
  modified_base (2)..(2): bicyclic nucleic acid (BNA)
  modified_base (3)..(3): 5-methyl modified nucleotide
  modified_base (4)..(4): 5-methyl modified nucleotide
  modified_base (7)..(7): 5-methyl modified nucleotide
  modified_base (10)..(10): 5-methyl modified nucleotide
  modified_base (22)..(22): 5-methyl modified nucleotide
  modified_base (24)..(24): bicyclic nucleic acid (BNA)
  modified_base (25)..(25): bicyclic nucleic acid (BNA)
ctccaacaucaaggaagauggcatt

SEQ ID NO: 21278 - DNA, 24 bp, Artificial Sequence
  source: /note="Description of Artificial Sequence: Synthetic oligonucleotide"
  source: /note="Description of Combined DNA/RNA Molecule: Synthetic oligonucleotide"
  source: /note="DNA/RNA"
  source: /note="5' tri-ethylene glycol (TEG)"
  modified_base (1)..(1): 5-methyl bicyclic nucleic acid
  modified_base (2)..(2): bicyclic nucleic acid (BNA)
  modified_base (3)..(3): 5-methyl modified nucleotide
  modified_base (4)..(4): 5-methyl modified nucleotide
  modified_base (7)..(7): 5-methyl modified nucleotide
  modified_base (10)..(10): 5-methyl modified nucleotide
  modified_base (22)..(22): 5-methyl modified nucleotide
  modified_base (23)..(23): bicyclic nucleic acid (BNA)
  modified_base (24)..(24): bicyclic nucleic acid (BNA)
ctccaacaucaaggaagauggcat

SEQ ID NO: 21279 - DNA, 23 bp, Artificial Sequence
  source: /note="Description of Artificial Sequence: Synthetic oligonucleotide"
  source: /note="Description of Combined DNA/RNA Molecule: Synthetic oligonucleotide"
  source: /note="DNA/RNA"
  source: /note="5' tri-ethylene glycol (TEG)"
  modified_base (1)..(1): 5-methyl bicyclic nucleic acid
  modified_base (2)..(2): bicyclic nucleic acid (BNA)
  modified_base (3)..(3): 5-methyl modified nucleotide
  modified_base (4)..(4): 5-methyl modified nucleotide
  modified_base (7)..(7): 5-methyl modified nucleotide
  modified_base (10)..(10): 5-methyl modified nucleotide
  modified_base (22)..(22): 5-methyl bicyclic nucleic acid
  modified_base (23)..(23): bicyclic nucleic acid (BNA)
ctccaacaucaaggaagauggca

SEQ ID NO: 21280 - DNA, 22 bp, Artificial Sequence
  source: /note="Description of Artificial Sequence: Synthetic oligonucleotide"
  source: /note="Description of Combined DNA/RNA Molecule: Synthetic oligonucleotide"
  source: /note="DNA/RNA"
  source: /note="5' tri-ethylene glycol (TEG)"
  modified_base (1)..(1): 5-methyl bicyclic nucleic acid
  modified_base (2)..(2): bicyclic nucleic acid (BNA)
  modified_base (3)..(3): 5-methyl modified nucleotide
  modified_base (4)..(4): 5-methyl modified nucleotide
  modified_base (7)..(7): 5-methyl modified nucleotide
  modified_base (10)..(10): 5-methyl modified nucleotide
  modified_base (21)..(21): bicyclic nucleic acid (BNA)
  modified_base (22)..(22): 5-methyl bicyclic nucleic acid
ctccaacaucaaggaagauggc

SEQ ID NO: 21281 - DNA, 21 bp, Artificial Sequence
  source: /note="Description of Artificial Sequence: Synthetic oligonucleotide"
  source: /note="Description of Combined DNA/RNA Molecule: Synthetic oligonucleotide"
  source: /note="DNA/RNA"
  source: /note="5' tri-ethylene glycol (TEG)"
  modified_base (1)..(1): 5-methyl bicyclic nucleic acid
  modified_base (2)..(2): bicyclic nucleic acid (BNA)
  modified_base (3)..(3): 5-methyl modified nucleotide
  modified_base (4)..(4): 5-methyl modified nucleotide
  modified_base (7)..(7): 5-methyl modified nucleotide
  modified_base (10)..(10): 5-methyl modified nucleotide
  modified_base (20)..(20): bicyclic nucleic acid (BNA)
  modified_base (21)..(21): bicyclic nucleic acid (BNA)
ctccaacaucaaggaagaugg

SEQ ID NO: 21282 - DNA, 20 bp, Artificial Sequence
  source: /note="Description of Artificial Sequence: Synthetic oligonucleotide"
  source: /note="Description of Combined DNA/RNA Molecule: Synthetic oligonucleotide"
  source: /note="DNA/RNA"
  source: /note="5' tri-ethylene glycol (TEG)"
  modified_base (1)..(1): 5-methyl bicyclic nucleic acid
  modified_base (2)..(2): bicyclic nucleic acid (BNA)
  modified_base (3)..(3): 5-methyl modified nucleotide
  modified_base (4)..(4): 5-methyl modified nucleotide
  modified_base (7)..(7): 5-methyl modified nucleotide
  modified_base (10)..(10): 5-methyl modified nucleotide
  modified_base (19)..(19): bicyclic nucleic acid (BNA)
  modified_base (20)..(20): bicyclic nucleic acid (BNA)
ctccaacaucaaggaagatg

SEQ ID NO: 21283 - DNA, 19 bp, Artificial Sequence
  source: /note="Description of Artificial Sequence: Synthetic oligonucleotide"
  source: /note="Description of Combined DNA/RNA Molecule: Synthetic oligonucleotide"
  source: /note="DNA/RNA"
  source: /note="5' tri-ethylene glycol (TEG)"
  modified_base (1)..(1): 5-methyl bicyclic nucleic acid
  modified_base (2)..(2): bicyclic nucleic acid (BNA)
  modified_base (3)..(3): 5-methyl modified nucleotide
  modified_base (4)..(4): 5-methyl modified nucleotide
  modified_base (7)..(7): 5-methyl modified nucleotide
  modified_base (10)..(10): 5-methyl modified nucleotide
  modified_base (18)..(18): bicyclic nucleic acid (BNA)
  modified_base (19)..(19): bicyclic nucleic acid (BNA)
ctccaacaucaaggaagat

SEQ ID NO: 21284 - DNA, 18 bp, Artificial Sequence
  source: /note="Description of Artificial Sequence: Synthetic oligonucleotide"
  source: /note="Description of Combined DNA/RNA Molecule: Synthetic oligonucleotide"
  source: /note="DNA/RNA"
  source: /note="5' tri-ethylene glycol (TEG)"
  modified_base (1)..(1): 5-methyl bicyclic nucleic acid
  modified_base (2)..(2): bicyclic nucleic acid (BNA)
  modified_base (3)..(3): 5-methyl modified nucleotide
  modified_base (4)..(4): 5-methyl modified nucleotide
  modified_base (7)..(7): 5-methyl modified nucleotide
  modified_base (10)..(10): 5-methyl modified nucleotide
  modified_base (17)..(17): bicyclic nucleic acid (BNA)
  modified_base (18)..(18): bicyclic nucleic acid (BNA)
ctccaacaucaaggaaga

SEQ ID NO: 21285 - DNA, 17 bp, Artificial Sequence
  source: /note="Description of Artificial Sequence: Synthetic oligonucleotide"
  source: /note="Description of Combined DNA/RNA Molecule: Synthetic oligonucleotide"
  source: /note="DNA/RNA"
  source: /note="5' tri-ethylene glycol (TEG)"
  modified_base (1)..(1): 5-methyl bicyclic nucleic acid
  modified_base (2)..(2): bicyclic nucleic acid (BNA)
  modified_base (3)..(3): 5-methyl modified nucleotide
  modified_base (4)..(4): 5-methyl modified nucleotide
  modified_base (7)..(7): 5-methyl modified nucleotide
  modified_base (10)..(10): 5-methyl modified nucleotide
  modified_base (16)..(16): bicyclic nucleic acid (BNA)
  modified_base (17)..(17): bicyclic nucleic acid (BNA)
ctccaacaucaaggaag

SEQ ID NO: 21286 - DNA, 29 bp, Artificial Sequence
  source: /note="Description of Artificial Sequence: Synthetic oligonucleotide"
  source: /note="Description of Combined DNA/RNA Molecule: Synthetic oligonucleotide"
  source: /note="DNA/RNA"
  source: /note="5' tri-ethylene glycol (TEG)"
  modified_base (1)..(1): bicyclic nucleic acid (BNA)
  modified_base (2)..(2): 5-methyl bicyclic nucleic acid
  modified_base (3)..(3): 5-methyl modified nucleotide
  modified_base (6)..(6): 5-methyl modified nucleotide
  modified_base (9)..(9): 5-methyl modified nucleotide
  modified_base (21)..(21): 5-methyl modified nucleotide
  modified_base (26)..(26): 5-methyl modified nucleotide
  modified_base (28)..(28): bicyclic nucleic acid (BNA)
  modified_base (29)..(29): bicyclic nucleic acid (BNA)
tccaacaucaaggaagauggcauuucuag

SEQ ID NO: 21287 - DNA, 28 bp, Artificial Sequence
  source: /note="Description of Artificial Sequence: Synthetic oligonucleotide"
  source: /note="Description of Combined DNA/RNA Molecule: Synthetic oligonucleotide"
  source: /note="DNA/RNA"
  source: /note="5' tri-ethylene glycol (TEG)"
  modified_base (1)..(1): bicyclic nucleic acid (BNA)
  modified_base (2)..(2): 5-methyl bicyclic nucleic acid
  modified_base (3)..(3): 5-methyl modified nucleotide
  modified_base (6)..(6): 5-methyl modified nucleotide
  modified_base (9)..(9): 5-methyl modified nucleotide
  modified_base (21)..(21): 5-methyl modified nucleotide
  modified_base (26)..(26): 5-methyl modified nucleotide
  modified_base (27)..(27): bicyclic nucleic acid (BNA)
  modified_base (28)..(28): bicyclic nucleic acid (BNA)
tccaacaucaaggaagauggcauuucta

SEQ ID NO: 21288 - DNA, 27 bp, Artificial Sequence
  source: /note="Description of Artificial Sequence: Synthetic oligonucleotide"
  source: /note="Description of Combined DNA/RNA Molecule: Synthetic oligonucleotide"
  source: /note="DNA/RNA"
  source: /note="5' tri-ethylene glycol (TEG)"
  modified_base (1)..(1): bicyclic nucleic acid (BNA)
  modified_base (2)..(2): 5-methyl bicyclic nucleic acid
  modified_base (3)..(3): 5-methyl modified nucleotide
  modified_base (6)..(6): 5-methyl modified nucleotide
  modified_base (9)..(9): 5-methyl modified nucleotide
  modified_base (21)..(21): 5-methyl modified nucleotide
  modified_base (26)..(26): 5-methyl bicyclic nucleic acid
  modified_base (27)..(27): bicyclic nucleic acid (BNA)
tccaacaucaaggaagauggcauuuct

SEQ ID NO: 21289 - DNA, 26 bp, Artificial Sequence
  source: /note="Description of Artificial Sequence: Synthetic oligonucleotide"
  source: /note="Description of Combined DNA/RNA Molecule: Synthetic oligonucleotide"
  source: /note="DNA/RNA"
  source: /note="5' tri-ethylene glycol (TEG)"
  modified_base (1)..(1): bicyclic nucleic acid (BNA)
  modified_base (2)..(2): 5-methyl bicyclic nucleic acid
  modified_base (3)..(3): 5-methyl modified nucleotide
  modified_base (6)..(6): 5-methyl modified nucleotide
  modified_base (9)..(9): 5-methyl modified nucleotide
  modified_base (21)..(21): 5-methyl modified nucleotide
  modified_base (25)..(25): bicyclic nucleic acid (BNA)
  modified_base (26)..(26): 5-methyl bicyclic nucleic acid
tccaacaucaaggaagauggcauutc

SEQ ID NO: 21290 - DNA, 25 bp, Artificial Sequence
  source: /note="Description of Artificial Sequence: Synthetic oligonucleotide"
  source: /note="Description of Combined DNA/RNA Molecule: Synthetic oligonucleotide"
  source: /note="DNA/RNA"
  source: /note="5' tri-ethylene glycol (TEG)"
  modified_base (1)..(1): bicyclic nucleic acid (BNA)
  modified_base (2)..(2): 5-methyl bicyclic nucleic acid
  modified_base (3)..(3): 5-methyl modified nucleotide
  modified_base (6)..(6): 5-methyl modified nucleotide
  modified_base (9)..(9): 5-methyl modified nucleotide
  modified_base (21)..(21): 5-methyl modified nucleotide
  modified_base (24)..(24): bicyclic nucleic acid (BNA)
  modified_base (25)..(25): bicyclic nucleic acid (BNA)
tccaacaucaaggaagauggcautt

SEQ ID NO: 21291 - DNA, 24 bp, Artificial Sequence
  source: /note="Description of Artificial Sequence: Synthetic oligonucleotide"
  source: /note="Description of Combined DNA/RNA Molecule: Synthetic oligonucleotide"
  source: /note="DNA/RNA"
  source: /note="5' tri-ethylene glycol (TEG)"
  modified_base (1)..(1): bicyclic nucleic acid (BNA)
  modified_base (2)..(2): 5-methyl bicyclic nucleic acid
  modified_base (3)..(3): 5-methyl modified nucleotide
  modified_base (6)..(6): 5-methyl modified nucleotide
  modified_base (9)..(9): 5-methyl modified nucleotide
  modified_base (21)..(21): 5-methyl modified nucleotide
  modified_base (23)..(23): bicyclic nucleic acid (BNA)
  modified_base (24)..(24): bicyclic nucleic acid (BNA)
tccaacaucaaggaagauggcatt

SEQ ID NO: 21292 - DNA, 23 bp, Artificial Sequence
  source: /note="Description of Artificial Sequence: Synthetic oligonucleotide"
  source: /note="Description of Combined DNA/RNA Molecule: Synthetic oligonucleotide"
  source: /note="DNA/RNA"
  source: /note="5' tri-ethylene glycol (TEG)"
  modified_base (1)..(1): bicyclic nucleic acid (BNA)
  modified_base (2)..(2): 5-methyl bicyclic nucleic acid
  modified_base (3)..(3): 5-methyl modified nucleotide
  modified_base (6)..(6): 5-methyl modified nucleotide
  modified_base (9)..(9): 5-methyl modified nucleotide
  modified_base (21)..(21): 5-methyl modified nucleotide
  modified_base (22)..(22): bicyclic nucleic acid (BNA)
  modified_base (23)..(23): bicyclic nucleic acid (BNA)
tccaacaucaaggaagauggcat

SEQ ID NO: 21293 - DNA, 22 bp, Artificial Sequence
  source: /note="Description of Artificial Sequence: Synthetic oligonucleotide"
  source: /note="Description of Combined DNA/RNA Molecule: Synthetic oligonucleotide"
  source: /note="DNA/RNA"
  source: /note="5' tri-ethylene glycol (TEG)"
  modified_base (1)..(1): bicyclic nucleic acid (BNA)
  modified_base (2)..(2): 5-methyl bicyclic nucleic acid
  modified_base (3)..(3): 5-methyl modified nucleotide
  modified_base (6)..(6): 5-methyl modified nucleotide
  modified_base (9)..(9): 5-methyl modified nucleotide
  modified_base (21)..(21): 5-methyl bicyclic nucleic acid
  modified_base (22)..(22): bicyclic nucleic acid (BNA)
tccaacaucaaggaagauggca

SEQ ID NO: 21294 - DNA, 21 bp, Artificial Sequence
  source: /note="Description of Artificial Sequence: Synthetic oligonucleotide"
  source: /note="Description of Combined DNA/RNA Molecule: Synthetic oligonucleotide"
  source: /note="DNA/RNA"
  source: /note="5' tri-ethylene glycol (TEG)"
  modified_base (1)..(1): bicyclic nucleic acid (BNA)
  modified_base (2)..(2): 5-methyl bicyclic nucleic acid
  modified_base (3)..(3): 5-methyl modified nucleotide
  modified_base (6)..(6): 5-methyl modified nucleotide
  modified_base (9)..(9): 5-methyl modified nucleotide
  modified_base (20)..(20): bicyclic nucleic acid (BNA)
  modified_base (21)..(21): 5-methyl bicyclic nucleic acid
tccaacaucaaggaagauggc

SEQ ID NO: 21295 - DNA, 20 bp, Artificial Sequence
  source: /note="Description of Artificial Sequence: Synthetic oligonucleotide"
  source: /note="Description of Combined DNA/RNA Molecule: Synthetic oligonucleotide"
  source: /note="DNA/RNA"
  source: /note="5' tri-ethylene glycol (TEG)"
  modified_base (1)..(1): bicyclic nucleic acid (BNA)
  modified_base (2)..(2): 5-methyl bicyclic nucleic acid
  modified_base (3)..(3): 5-methyl modified nucleotide
  modified_base (6)..(6): 5-methyl modified nucleotide
  modified_base (9)..(9): 5-methyl modified nucleotide
  modified_base (19)..(19): bicyclic nucleic acid (BNA)
  modified_base (20)..(20): bicyclic nucleic acid (BNA)
tccaacaucaaggaagaugg

SEQ ID NO: 21296 - DNA, 19 bp, Artificial Sequence
  source: /note="Description of Artificial Sequence: Synthetic oligonucleotide"
  source: /note="Description of Combined DNA/RNA Molecule: Synthetic oligonucleotide"
  source: /note="DNA/RNA"
  source: /note="5' tri-ethylene glycol (TEG)"
  modified_base (1)..(1): bicyclic nucleic acid (BNA)
  modified_base (2)..(2): 5-methyl bicyclic nucleic acid
  modified_base (3)..(3): 5-methyl modified nucleotide
  modified_base (6)..(6): 5-methyl modified nucleotide
  modified_base (9)..(9): 5-methyl modified nucleotide
  modified_base (18)..(18): bicyclic nucleic acid (BNA)
  modified_base (19)..(19): bicyclic nucleic acid (BNA)
tccaacaucaaggaagatg

SEQ ID NO: 21297 - DNA, 18 bp, Artificial Sequence
  source: /note="Description of Artificial Sequence: Synthetic oligonucleotide"
  source: /note="Description of Combined DNA/RNA Molecule: Synthetic oligonucleotide"
  source: /note="DNA/RNA"
  source: /note="5' tri-ethylene glycol (TEG)"
  modified_base (1)..(1): bicyclic nucleic acid (BNA)
  modified_base (2)..(2): 5-methyl bicyclic nucleic acid
  modified_base (3)..(3): 5-methyl modified nucleotide
  modified_base (6)..(6): 5-methyl modified nucleotide
  modified_base (9)..(9): 5-methyl modified nucleotide
  modified_base (17)..(17): bicyclic nucleic acid (BNA)
  modified_base (18)..(18): bicyclic nucleic acid (BNA)
tccaacaucaaggaagat

SEQ ID NO: 21298 - DNA, 17 bp, Artificial Sequence
  source: /note="Description of Artificial Sequence: Synthetic oligonucleotide"
  source: /note="Description of Combined DNA/RNA Molecule: Synthetic oligonucleotide"
  source: /note="DNA/RNA"
  source: /note="5' tri-ethylene glycol (TEG)"
  modified_base (1)..(1): bicyclic nucleic acid (BNA)
  modified_base (2)..(2): 5-methyl bicyclic nucleic acid
  modified_base (3)..(3): 5-methyl modified nucleotide
  modified_base (6)..(6): 5-methyl modified nucleotide
  modified_base (9)..(9): 5-methyl modified nucleotide
  modified_base (16)..(16): bicyclic nucleic acid (BNA)
  modified_base (17)..(17): bicyclic nucleic acid (BNA)
tccaacaucaaggaaga

SEQ ID NO: 21299 - DNA, 16 bp, Artificial Sequence
  source: /note="Description of Artificial Sequence: Synthetic oligonucleotide"
  source: /note="Description of Combined DNA/RNA Molecule: Synthetic oligonucleotide"
  source: /note="DNA/RNA"
  source: /note="5' tri-ethylene glycol (TEG)"
  modified_base (1)..(1): bicyclic nucleic acid (BNA)
  modified_base (2)..(2): 5-methyl bicyclic nucleic acid
  modified_base (3)..(3): 5-methyl modified nucleotide
  modified_base (6)..(6): 5-methyl modified nucleotide
  modified_base (9)..(9): 5-methyl modified nucleotide
  modified_base (15)..(15): bicyclic nucleic acid (BNA)
  modified_base (16)..(16): bicyclic nucleic acid (BNA)
tccaacaucaaggaag

SEQ ID NO: 21300 - RNA, 28 nt, Artificial Sequence
  source: /note="Description of Artificial Sequence: Synthetic oligonucleotide"
  source: /note="RNA"
  source: /note="5' tri-ethylene glycol (TEG)"
  modified_base (1)..(1): 5-methyl bicyclic nucleic acid
  modified_base (2)..(2): 5-methyl bicyclic nucleic acid
  modified_base (5)..(5): 5-methyl modified nucleotide
  modified_base (8)..(8): 5-methyl modified nucleotide
  modified_base (20)..(20): 5-methyl modified nucleotide
  modified_base (25)..(25): 5-methyl modified nucleotide
  modified_base (27)..(27): bicyclic nucleic acid (BNA)
  modified_base (28)..(28): bicyclic nucleic acid (BNA)
ccaacaucaaggaagauggcauuucuag

SEQ ID NO: 21301 - DNA, 27 bp, Artificial Sequence
  source: /note="Description of Artificial Sequence: Synthetic oligonucleotide"
  source: /note="Description of Combined DNA/RNA Molecule: Synthetic oligonucleotide"
  source: /note="DNA/RNA"
  source: /note="5' tri-ethylene glycol (TEG)"
  modified_base (1)..(1): 5-methyl bicyclic nucleic acid
  modified_base (2)..(2): 5-methyl bicyclic nucleic acid
  modified_base (5)..(5): 5-methyl modified nucleotide
  modified_base (8)..(8): 5-methyl modified nucleotide
  modified_base (20)..(20): 5-methyl modified nucleotide
  modified_base (25)..(25): 5-methyl modified nucleotide
  modified_base (26)..(26): bicyclic nucleic acid (BNA)
  modified_base (27)..(27): bicyclic nucleic acid (BNA)
ccaacaucaaggaagauggcauuucta

SEQ ID NO: 21302 - DNA, 26 bp, Artificial Sequence
  source: /note="Description of Artificial Sequence: Synthetic oligonucleotide"
  source: /note="Description of Combined DNA/RNA Molecule: Synthetic oligonucleotide"
  source: /note="DNA/RNA"
  source: /note="5' tri-ethylene glycol (TEG)"
  modified_base (1)..(1): 5-methyl bicyclic nucleic acid
  modified_base (2)..(2): 5-methyl bicyclic nucleic acid
  modified_base (5)..(5): 5-methyl modified nucleotide
  modified_base (8)..(8): 5-methyl modified nucleotide
  modified_base (20)..(20): 5-methyl modified nucleotide
  modified_base (25)..(25): 5-methyl bicyclic nucleic acid
  modified_base (26)..(26): bicyclic nucleic acid (BNA)
ccaacaucaaggaagauggcauuuct

SEQ ID NO: 21303 - DNA, 25 bp, Artificial Sequence
  source: /note="Description of Artificial Sequence: Synthetic oligonucleotide"
  source: /note="Description of Combined DNA/RNA Molecule: Synthetic oligonucleotide"
  source: /note="DNA/RNA"
  source: /note="5' tri-ethylene glycol (TEG)"
  modified_base (1)..(1): 5-methyl bicyclic nucleic acid
  modified_base (2)..(2): 5-methyl bicyclic nucleic acid
  modified_base (5)..(5): 5-methyl modified nucleotide
  modified_base (8)..(8): 5-methyl modified nucleotide
  modified_base (20)..(20): 5-methyl modified nucleotide
  modified_base (24)..(24): bicyclic nucleic acid (BNA)
  modified_base (25)..(25): 5-methyl bicyclic nucleic acid
ccaacaucaaggaagauggcauutc

SEQ ID NO: 21304 - DNA, 24 bp, Artificial Sequence
  source: /note="Description of Artificial Sequence: Synthetic oligonucleotide"
  source: /note="Description of Combined DNA/RNA Molecule: Synthetic oligonucleotide"
  source: /note="DNA/RNA"
  source: /note="5' tri-ethylene glycol (TEG)"
  modified_base (1)..(1): 5-methyl bicyclic nucleic acid
  modified_base (2)..(2): 5-methyl bicyclic nucleic acid
  modified_base (5)..(5): 5-methyl modified nucleotide
  modified_base (8)..(8): 5-methyl modified nucleotide
  modified_base (20)..(20): 5-methyl modified nucleotide
  modified_base (23)..(23): bicyclic nucleic acid (BNA)
  modified_base (24)..(24): bicyclic nucleic acid (BNA)
ccaacaucaaggaagauggcautt

SEQ ID NO: 21305 - DNA, 23 bp, Artificial Sequence
  source: /note="Description of Artificial Sequence: Synthetic oligonucleotide"
  source: /note="Description of Combined DNA/RNA Molecule: Synthetic oligonucleotide"
  source: /note="DNA/RNA"
  source: /note="5' tri-ethylene glycol (TEG)"
  modified_base (1)..(1): 5-methyl bicyclic nucleic acid
  modified_base (2)..(2): 5-methyl bicyclic nucleic acid
  modified_base (5)..(5): 5-methyl modified nucleotide
  modified_base (8)..(8): 5-methyl modified nucleotide
  modified_base (20)..(20): 5-methyl modified nucleotide
  modified_base (22)..(22): bicyclic nucleic acid (BNA)
  modified_base (23)..(23): bicyclic nucleic acid (BNA)
ccaacaucaaggaagauggcatt

SEQ ID NO: 21306 - DNA, 22 bp, Artificial Sequence
  source: /note="Description of Artificial Sequence: Synthetic oligonucleotide"
  source: /note="Description of Combined DNA/RNA Molecule: Synthetic oligonucleotide"
  source: /note="DNA/RNA"
  source: /note="5' tri-ethylene glycol (TEG)"
  modified_base (1)..(1): 5-methyl bicyclic nucleic acid
  modified_base (2)..(2): 5-methyl bicyclic nucleic acid
  modified_base (5)..(5): 5-methyl modified nucleotide
  modified_base (8)..(8): 5-methyl modified nucleotide
  modified_base (20)..(20): 5-methyl modified nucleotide
  modified_base (21)..(21): bicyclic nucleic acid (BNA)
  modified_base (22)..(22): bicyclic nucleic acid (BNA)
ccaacaucaaggaagauggcat

SEQ ID NO: 21307 - RNA, 21 nt, Artificial Sequence
  source: /note="Description of Artificial Sequence: Synthetic oligonucleotide"
  source: /note="RNA"
  source: /note="5' tri-ethylene glycol (TEG)"
  modified_base (1)..(1): 5-methyl bicyclic nucleic acid
  modified_base (2)..(2): 5-methyl bicyclic nucleic acid
  modified_base (5)..(5): 5-methyl modified nucleotide
  modified_base (8)..(8): 5-methyl modified nucleotide
  modified_base (20)..(20): 5-methyl bicyclic nucleic acid
  modified_base (21)..(21): bicyclic nucleic acid (BNA)
ccaacaucaaggaagauggca

SEQ ID NO: 21308 - RNA, 20 nt, Artificial Sequence
  source: /note="Description of Artificial Sequence: Synthetic oligonucleotide"
  source: /note="RNA"
  source: /note="5' tri-ethylene glycol (TEG)"
  modified_base (1)..(1): 5-methyl bicyclic nucleic acid
  modified_base (2)..(2): 5-methyl bicyclic nucleic acid
  modified_base (5)..(5): 5-methyl modified nucleotide
  modified_base (8)..(8): 5-methyl modified nucleotide
  modified_base (19)..(19): bicyclic nucleic acid (BNA)
  modified_base (20)..(20): 5-methyl bicyclic nucleic acid
ccaacaucaaggaagauggc

SEQ ID NO: 21309 - RNA, 19 nt, Artificial Sequence
  source: /note="Description of Artificial Sequence: Synthetic oligonucleotide"
  source: /note="RNA"
  source: /note="5' tri-ethylene glycol (TEG)"
  modified_base (1)..(1): 5-methyl bicyclic nucleic acid
  modified_base (2)..(2): 5-methyl bicyclic nucleic acid
  modified_base (5)..(5): 5-methyl modified nucleotide
  modified_base (8)..(8): 5-methyl modified nucleotide
  modified_base (18)..(18): bicyclic nucleic acid (BNA)
  modified_base (19)..(19): bicyclic nucleic acid (BNA)
ccaacaucaaggaagaugg

SEQ ID NO: 21310 - DNA, 18 bp, Artificial Sequence
  source: /note="Description of Artificial Sequence: Synthetic oligonucleotide"
  source: /note="Description of Combined DNA/RNA Molecule: Synthetic oligonucleotide"
  source: /note="DNA/RNA"
  source: /note="5' tri-ethylene glycol (TEG)"
  modified_base (1)..(1): 5-methyl bicyclic nucleic acid
  modified_base (2)..(2): 5-methyl bicyclic nucleic acid
  modified_base (5)..(5): 5-methyl modified nucleotide
  modified_base (8)..(8): 5-methyl modified nucleotide
  modified_base (17)..(17): bicyclic nucleic acid (BNA)
  modified_base (18)..(18): bicyclic nucleic acid (BNA)
ccaacaucaaggaagatg

SEQ ID NO: 21311 - DNA, 17 bp, Artificial Sequence
  source: /note="Description of Artificial Sequence: Synthetic oligonucleotide"
  source: /note="Description of Combined DNA/RNA Molecule: Synthetic oligonucleotide"
  source: /note="DNA/RNA"
  source: /note="5' tri-ethylene glycol (TEG)"
  modified_base (1)..(1): 5-methyl bicyclic nucleic acid
  modified_base (2)..(2): 5-methyl bicyclic nucleic acid
  modified_base (5)..(5): 5-methyl modified nucleotide
  modified_base (8)..(8): 5-methyl modified nucleotide
  modified_base (16)..(16): bicyclic nucleic acid (BNA)
  modified_base (17)..(17): bicyclic nucleic acid (BNA)
ccaacaucaaggaagat

SEQ ID NO: 21312 - RNA, 16 nt, Artificial Sequence
  source: /note="Description of Artificial Sequence: Synthetic oligonucleotide"
  source: /note="RNA"
  source: /note="5' tri-ethylene glycol (TEG)"
  modified_base (1)..(1): 5-methyl bicyclic nucleic acid
  modified_base (2)..(2): 5-methyl bicyclic nucleic acid
  modified_base (5)..(5): 5-methyl modified nucleotide
  modified_base (8)..(8): 5-methyl modified nucleotide
  modified_base (15)..(15): bicyclic nucleic acid (BNA)
  modified_base (16)..(16): bicyclic nucleic acid (BNA)
ccaacaucaaggaaga

SEQ ID NO: 21313 - RNA, 15 nt, Artificial Sequence
  source: /note="Description of Artificial Sequence: Synthetic oligonucleotide"
  source: /note="RNA"
  source: /note="5' tri-ethylene glycol (TEG)"
  modified_base (1)..(1): 5-methyl bicyclic nucleic acid
  modified_base (2)..(2): 5-methyl bicyclic nucleic acid
  modified_base (5)..(5): 5-methyl modified nucleotide
  modified_base (8)..(8): 5-methyl modified nucleotide
  modified_base (14)..(14): bicyclic nucleic acid (BNA)
  modified_base (15)..(15): bicyclic nucleic acid (BNA)
ccaacaucaaggaag

SEQ ID NO: 21314 - RNA, 27 nt, Artificial Sequence
  source: /note="Description of Artificial Sequence: Synthetic oligonucleotide"
  source: /note="RNA"
  source: /note="5' tri-ethylene glycol (TEG)"
  modified_base (1)..(1): 5-methyl bicyclic nucleic acid
  modified_base (2)..(2): bicyclic nucleic acid (BNA)
  modified_base (4)..(4): 5-methyl modified nucleotide
  modified_base (7)..(7): 5-methyl modified nucleotide
  modified_base (19)..(19): 5-methyl modified nucleotide
  modified_base (24)..(24): 5-methyl modified nucleotide
  modified_base (26)..(26): bicyclic nucleic acid (BNA)
  modified_base (27)..(27): bicyclic nucleic acid (BNA)
caacaucaaggaagauggcauuucuag

SEQ ID NO: 21315 - DNA, 26 bp, Artificial Sequence
  source: /note="Description of Artificial Sequence: Synthetic oligonucleotide"
  source: /note="Description of Combined DNA/RNA Molecule: Synthetic oligonucleotide"
  source: /note="DNA/RNA"
  source: /note="5' tri-ethylene glycol (TEG)"
  modified_base (1)..(1): 5-methyl bicyclic nucleic acid
  modified_base (2)..(2): bicyclic nucleic acid (BNA)
  modified_base (4)..(4): 5-methyl modified nucleotide
  modified_base (7)..(7): 5-methyl modified nucleotide
  modified_base (19)..(19): 5-methyl modified nucleotide
  modified_base (24)..(24): 5-methyl modified nucleotide
  modified_base (25)..(25): bicyclic nucleic acid (BNA)
  modified_base (26)..(26): bicyclic nucleic acid (BNA)
caacaucaaggaagauggcauuucta

SEQ ID NO: 21316 - DNA, 25 bp, Artificial Sequence
  source: /note="Description of Artificial Sequence: Synthetic oligonucleotide"
  source: /note="Description of Combined DNA/RNA Molecule: Synthetic oligonucleotide"
  source: /note="DNA/RNA"
  source: /note="5' tri-ethylene glycol (TEG)"
  modified_base (1)..(1): 5-methyl bicyclic nucleic acid
  modified_base (2)..(2): bicyclic nucleic acid (BNA)
  modified_base (4)..(4): 5-methyl modified nucleotide
  modified_base (7)..(7): 5-methyl modified nucleotide
  modified_base (19)..(19): 5-methyl modified nucleotide
  modified_base (24)..(24): 5-methyl bicyclic nucleic acid
  modified_base (25)..(25): bicyclic nucleic acid (BNA)
caacaucaaggaagauggcauuuct

SEQ ID NO: 21317 - DNA, 24 bp, Artificial Sequence
  source: /note="Description of Artificial Sequence: Synthetic oligonucleotide"
  source: /note="Description of Combined DNA/RNA Molecule: Synthetic oligonucleotide"
  source: /note="DNA/RNA"
  source: /note="5' tri-ethylene glycol (TEG)"
  modified_base (1)..(1): 5-methyl bicyclic nucleic acid
  modified_base (2)..(2): bicyclic nucleic acid (BNA)
  modified_base (4)..(4): 5-methyl modified nucleotide
  modified_base (7)..(7): 5-methyl modified nucleotide
  modified_base (19)..(19): 5-methyl modified nucleotide
  modified_base (23)..(23): bicyclic nucleic acid (BNA)
  modified_base (24)..(24): 5-methyl bicyclic nucleic acid
caacaucaaggaagauggcauutc

SEQ ID NO: 21318 - DNA, 23 bp, Artificial Sequence
  source: /note="Description of Artificial Sequence: Synthetic oligonucleotide"
  source: /note="Description of Combined DNA/RNA Molecule: Synthetic oligonucleotide"
  source: /note="DNA/RNA"
  source: /note="5' tri-ethylene glycol (TEG)"
  modified_base (1)..(1): 5-methyl bicyclic nucleic acid
  modified_base (2)..(2): bicyclic nucleic acid (BNA)
  modified_base (4)..(4): 5-methyl modified nucleotide
  modified_base (7)..(7): 5-methyl modified nucleotide
  modified_base (19)..(19): 5-methyl modified nucleotide
  modified_base (22)..(22): bicyclic nucleic acid (BNA)
  modified_base (23)..(23): bicyclic nucleic acid (BNA)
caacaucaaggaagauggcautt

SEQ ID NO: 21319 - DNA, 22 bp, Artificial Sequence
  source: /note="Description of Artificial Sequence: Synthetic oligonucleotide"
  source: /note="Description of Combined DNA/RNA Molecule: Synthetic oligonucleotide"
  source: /note="DNA/RNA"
  source: /note="5' tri-ethylene glycol (TEG)"
  modified_base (1)..(1): 5-methyl bicyclic nucleic acid
  modified_base (2)..(2): bicyclic nucleic acid (BNA)
  modified_base (4)..(4): 5-methyl modified nucleotide
  modified_base (7)..(7): 5-methyl modified nucleotide
  modified_base (19)..(19): 5-methyl modified nucleotide
  modified_base (21)..(21): bicyclic nucleic acid (BNA)
  modified_base (22)..(22): bicyclic nucleic acid (BNA)
caacaucaaggaagauggcatt

SEQ ID NO: 21320 - DNA, 21 bp, Artificial Sequence
  source: /note="Description of Artificial Sequence: Synthetic oligonucleotide"
  source: /note="Description of Combined DNA/RNA Molecule: Synthetic oligonucleotide"
  source: /note="DNA/RNA"
  source: /note="5' tri-ethylene glycol (TEG)"
  modified_base (1)..(1): 5-methyl bicyclic nucleic acid
  modified_base (2)..(2): bicyclic nucleic acid (BNA)
  modified_base (4)..(4): 5-methyl modified nucleotide
  modified_base (7)..(7): 5-methyl modified nucleotide
  modified_base (19)..(19): 5-methyl modified nucleotide
  modified_base (20)..(20): bicyclic nucleic acid (BNA)
  modified_base (21)..(21): bicyclic nucleic acid (BNA)
caacaucaaggaagauggcat

SEQ ID NO: 21321 - RNA, 20 nt, Artificial Sequence
  source: /note="Description of Artificial Sequence: Synthetic oligonucleotide"
  source: /note="RNA"
  source: /note="5' tri-ethylene glycol (TEG)"
  modified_base (1)..(1): 5-methyl bicyclic nucleic acid
  modified_base (2)..(2): bicyclic nucleic acid (BNA)
  modified_base (4)..(4): 5-methyl modified nucleotide
  modified_base (7)..(7): 5-methyl modified nucleotide
  modified_base (19)..(19): 5-methyl bicyclic nucleic acid
  modified_base (20)..(20): bicyclic nucleic acid (BNA)
caacaucaaggaagauggca

SEQ ID NO: 21322 - RNA, 19 nt, Artificial Sequence
  source: /note="Description of Artificial Sequence: Synthetic oligonucleotide"
  source: /note="RNA"
  source: /note="5' tri-ethylene glycol (TEG)"
  modified_base (1)..(1): 5-methyl bicyclic nucleic acid
  modified_base (2)..(2): bicyclic nucleic acid (BNA)
  modified_base (4)..(4): 5-methyl modified nucleotide
  modified_base (7)..(7): 5-methyl modified nucleotide
  modified_base (18)..(18): bicyclic nucleic acid (BNA)
  modified_base (19)..(19): 5-methyl bicyclic nucleic acid
caacaucaaggaagauggc

SEQ ID NO: 21323 - RNA, 18 nt, Artificial Sequence
  source: /note="Description of Artificial Sequence: Synthetic oligonucleotide"
  source: /note="RNA"
  source: /note="5' tri-ethylene glycol (TEG)"
  modified_base (1)..(1): 5-methyl bicyclic nucleic acid
  modified_base (2)..(2): bicyclic nucleic acid (BNA)
  modified_base (4)..(4): 5-methyl modified nucleotide
  modified_base (7)..(7): 5-methyl modified nucleotide
  modified_base (17)..(17): bicyclic nucleic acid (BNA)
  modified_base (18)..(18): bicyclic nucleic acid (BNA)
caacaucaaggaagaugg

SEQ ID NO: 21324 - DNA, 17 bp, Artificial Sequence
  source: /note="Description of Artificial Sequence: Synthetic oligonucleotide"
  source: /note="Description of Combined DNA/RNA Molecule: Synthetic oligonucleotide"
  source: /note="DNA/RNA"
  source: /note="5' tri-ethylene glycol (TEG)"
  modified_base (1)..(1): 5-methyl bicyclic nucleic acid
  modified_base (2)..(2): bicyclic nucleic acid (BNA)
  modified_base (4)..(4): 5-methyl modified nucleotide
  modified_base (7)..(7): 5-methyl modified nucleotide
  modified_base (16)..(16): bicyclic nucleic acid (BNA)
  modified_base (17)..(17): bicyclic nucleic acid (BNA)
caacaucaaggaagatg

SEQ ID NO: 21325 - DNA, 16 bp, Artificial Sequence
  source: /note="Description of Artificial Sequence: Synthetic oligonucleotide"
  source: /note="Description of Combined DNA/RNA Molecule: Synthetic oligonucleotide"
  source: /note="DNA/RNA"
  source: /note="5' tri-ethylene glycol (TEG)"
  modified_base (1)..(1): 5-methyl bicyclic nucleic acid
  modified_base (2)..(2): bicyclic nucleic acid (BNA)
  modified_base (4)..(4): 5-methyl modified nucleotide
  modified_base (7)..(7): 5-methyl modified nucleotide
  modified_base (15)..(15): bicyclic nucleic acid (BNA)
  modified_base (16)..(16): bicyclic nucleic acid (BNA)
caacaucaaggaagat

SEQ ID NO: 21326 - RNA, 15 nt, Artificial Sequence
  source: /note="Description of Artificial Sequence: Synthetic oligonucleotide"
  source: /note="RNA"
  source: /note="5' tri-ethylene glycol (TEG)"
  modified_base (1)..(1): 5-methyl bicyclic nucleic acid
  modified_base (2)..(2): bicyclic nucleic acid (BNA)
  modified_base (4)..(4): 5-methyl modified nucleotide
  modified_base (7)..(7): 5-methyl modified nucleotide
  modified_base (14)..(14): bicyclic nucleic acid (BNA)
  modified_base (15)..(15): bicyclic nucleic acid (BNA)
caacaucaaggaaga

SEQ ID NO: 21327 - RNA, 14 nt, Artificial Sequence
  source: /note="Description of Artificial Sequence: Synthetic oligonucleotide"
  source: /note="RNA"
  source: /note="5' tri-ethylene glycol (TEG)"
  modified_base (1)..(1): 5-methyl bicyclic nucleic acid
  modified_base (2)..(2): bicyclic nucleic acid (BNA)
  modified_base (4)..(4): 5-methyl modified nucleotide
  modified_base (7)..(7): 5-methyl modified nucleotide
  modified_base (13)..(13): bicyclic nucleic acid (BNA)
  modified_base (14)..(14): bicyclic nucleic acid (BNA)
caacaucaaggaag

SEQ ID NO: 21328 - RNA, 26 nt, Artificial Sequence
  source: /note="Description of Artificial Sequence: Synthetic oligonucleotide"
  source: /note="RNA"
  source: /note="5' tri-ethylene glycol (TEG)"
  modified_base (1)..(1): bicyclic nucleic acid (BNA)
  modified_base (2)..(2): bicyclic nucleic acid (BNA)
  modified_base (3)..(3): 5-methyl modified nucleotide
  modified_base (6)..(6): 5-methyl modified nucleotide
  modified_base (18)..(18): 5-methyl modified nucleotide
  modified_base (23)..(23): 5-methyl modified nucleotide
  modified_base (25)..(25): bicyclic nucleic acid (BNA)
  modified_base (26)..(26): bicyclic nucleic acid (BNA)
aacaucaaggaagauggcauuucuag

SEQ ID NO: 21329 - DNA, 25 bp, Artificial Sequence
  source: /note="Description of Artificial Sequence: Synthetic oligonucleotide"
  source: /note="Description of Combined DNA/RNA Molecule: Synthetic oligonucleotide"
  source: /note="DNA/RNA"
  source: /note="5' tri-ethylene glycol (TEG)"
  modified_base (1)..(1): bicyclic nucleic acid (BNA)
  modified_base (2)..(2): bicyclic nucleic acid (BNA)
  modified_base (3)..(3): 5-methyl modified nucleotide
  modified_base (6)..(6): 5-methyl modified nucleotide
  modified_base (18)..(18): 5-methyl modified nucleotide
  modified_base (23)..(23): 5-methyl modified nucleotide
  modified_base (24)..(24): bicyclic nucleic acid (BNA)
  modified_base (25)..(25): bicyclic nucleic acid (BNA)
aacaucaaggaagauggcauuucta

SEQ ID NO: 21330 - DNA, 24 bp, Artificial Sequence
  source: /note="Description of Artificial Sequence: Synthetic oligonucleotide"
  source: /note="Description of Combined DNA/RNA Molecule: Synthetic oligonucleotide"
  source: /note="DNA/RNA"
  source: /note="5' tri-ethylene glycol (TEG)"
  modified_base (1)..(1): bicyclic nucleic acid (BNA)
  modified_base (2)..(2): bicyclic nucleic acid (BNA)
  modified_base (3)..(3): 5-methyl modified nucleotide
  modified_base (6)..(6): 5-methyl modified nucleotide
  modified_base (18)..(18): 5-methyl modified nucleotide
  modified_base (23)..(23): 5-methyl bicyclic nucleic acid
  modified_base (24)..(24): bicyclic nucleic acid (BNA)
aacaucaaggaagauggcauuuct

SEQ ID NO: 21331 - DNA, 23 bp, Artificial Sequence
  source: /note="Description of Artificial Sequence: Synthetic oligonucleotide"
  source: /note="Description of Combined DNA/RNA Molecule: Synthetic oligonucleotide"
  source: /note="DNA/RNA"
  source: /note="5' tri-ethylene glycol (TEG)"
  modified_base (1)..(1): bicyclic nucleic acid (BNA)
  modified_base (2)..(2): bicyclic nucleic acid (BNA)
  modified_base (3)..(3): 5-methyl modified nucleotide
  modified_base (6)..(6): 5-methyl modified nucleotide
  modified_base (18)..(18): 5-methyl modified nucleotide
  modified_base (22)..(22): bicyclic nucleic acid (BNA)
  modified_base (23)..(23): 5-methyl bicyclic nucleic acid
aacaucaaggaagauggcauutc

SEQ ID NO: 21332 - DNA, 22 bp, Artificial Sequence
  source: /note="Description of Artificial Sequence: Synthetic oligonucleotide"
  source: /note="Description of Combined DNA/RNA Molecule: Synthetic oligonucleotide"
  source: /note="DNA/RNA"
  source: /note="5' tri-ethylene glycol (TEG)"
  modified_base (1)..(1): bicyclic nucleic acid (BNA)
  modified_base (2)..(2): bicyclic nucleic acid (BNA)
  modified_base (3)..(3): 5-methyl modified nucleotide
  modified_base (6)..(6): 5-methyl modified nucleotide
  modified_base (18)..(18): 5-methyl modified nucleotide
  modified_base (21)..(21): bicyclic nucleic acid (BNA)
  modified_base (22)..(22): bicyclic nucleic acid (BNA)
aacaucaaggaagauggcautt

SEQ ID NO: 21333 - DNA, 21 bp, Artificial Sequence
  source: /note="Description of Artificial Sequence: Synthetic oligonucleotide"
  source: /note="Description of Combined DNA/RNA Molecule: Synthetic oligonucleotide"
  source: /note="DNA/RNA"
  source: /note="5' tri-ethylene glycol (TEG)"
  modified_base (1)..(1): bicyclic nucleic acid (BNA)
  modified_base (2)..(2): bicyclic nucleic acid (BNA)
  modified_base (3)..(3): 5-methyl modified nucleotide
  modified_base (6)..(6): 5-methyl modified nucleotide
  modified_base (18)..(18): 5-methyl modified nucleotide
  modified_base (20)..(20): bicyclic nucleic acid (BNA)
  modified_base (21)..(21): bicyclic nucleic acid (BNA)
aacaucaaggaagauggcatt

SEQ ID NO: 21334 - DNA, 20 bp, Artificial Sequence
  source: /note="Description of Artificial Sequence: Synthetic oligonucleotide"
  source: /note="Description of Combined DNA/RNA Molecule: Synthetic oligonucleotide"
  source: /note="DNA/RNA"
  source: /note="5' tri-ethylene glycol (TEG)"
  modified_base (1)..(1): bicyclic nucleic acid (BNA)
  modified_base (2)..(2): bicyclic nucleic acid (BNA)
  modified_base (3)..(3): 5-methyl modified nucleotide
  modified_base (6)..(6): 5-methyl modified nucleotide
  modified_base (18)..(18): 5-methyl modified nucleotide
  modified_base (19)..(19): bicyclic nucleic acid (BNA)
  modified_base (20)..(20): bicyclic nucleic acid (BNA)
aacaucaaggaagauggcat

SEQ ID NO: 21335 - RNA, 19 nt, Artificial Sequence
  source: /note="Description of Artificial Sequence: Synthetic oligonucleotide"
  source: /note="RNA"
  source: /note="5' tri-ethylene glycol (TEG)"
  modified_base (1)..(1): bicyclic nucleic acid (BNA)
  modified_base (2)..(2): bicyclic nucleic acid (BNA)
  modified_base (3)..(3): 5-methyl modified nucleotide
  modified_base (6)..(6): 5-methyl modified nucleotide
  modified_base (18)..(18): 5-methyl bicyclic nucleic acid
  modified_base (19)..(19): bicyclic nucleic acid (BNA)
aacaucaaggaagauggca

SEQ ID NO: 21336 - RNA, 18 nt, Artificial Sequence
  source: /note="Description of Artificial Sequence: Synthetic oligonucleotide"
  source: /note="RNA"
  source: /note="5' tri-ethylene glycol (TEG)"
  modified_base (1)..(1): bicyclic nucleic acid (BNA)
  modified_base (2)..(2): bicyclic nucleic acid (BNA)
  modified_base (3)..(3): 5-methyl modified nucleotide
  modified_base (6)..(6): 5-methyl modified nucleotide
  modified_base (17)..(17): bicyclic nucleic acid (BNA)
  modified_base (18)..(18): 5-methyl bicyclic nucleic acid
aacaucaaggaagauggc

SEQ ID NO: 21337 - RNA, 17 nt, Artificial Sequence
  source: /note="Description of Artificial Sequence: Synthetic oligonucleotide"
  source: /note="RNA"
  source: /note="5' tri-ethylene glycol (TEG)"
  modified_base (1)..(1): bicyclic nucleic acid (BNA)
  modified_base (2)..(2): bicyclic nucleic acid (BNA)
  modified_base (3)..(3): 5-methyl modified nucleotide
  modified_base (6)..(6): 5-methyl modified nucleotide
  modified_base (16)..(16): bicyclic nucleic acid (BNA)
  modified_base (17)..(17): bicyclic nucleic acid (BNA)
aacaucaaggaagaugg

SEQ ID NO: 21338 - DNA, 16 bp, Artificial Sequence
  source: /note="Description of Artificial Sequence: Synthetic oligonucleotide"
  source: /note="Description of Combined DNA/RNA Molecule: Synthetic oligonucleotide"
  source: /note="DNA/RNA"
  source: /note="5' tri-ethylene glycol (TEG)"
  modified_base (1)..(1): bicyclic nucleic acid (BNA)
  modified_base (2)..(2): bicyclic nucleic acid (BNA)
  modified_base (3)..(3): 5-methyl modified nucleotide
  modified_base (6)..(6): 5-methyl modified nucleotide
  modified_base (15)..(15): bicyclic nucleic acid (BNA)
  modified_base (16)..(16): bicyclic nucleic acid (BNA)
aacaucaaggaagatg

SEQ ID NO: 21339 - DNA, 15 bp, Artificial Sequence
  source: /note="Description of Artificial Sequence: Synthetic oligonucleotide"
  source: /note="Description of Combined DNA/RNA Molecule: Synthetic oligonucleotide"
  source: /note="DNA/RNA"
  source: /note="5' tri-ethylene glycol (TEG)"
  modified_base (1)..(1): bicyclic nucleic acid (BNA)
  modified_base (2)..(2): bicyclic nucleic acid (BNA)
  modified_base (3)..(3): 5-methyl modified nucleotide
  modified_base (6)..(6): 5-methyl modified nucleotide
  modified_base (14)..(14): bicyclic nucleic acid (BNA)
  modified_base (15)..(15): bicyclic nucleic acid (BNA)
aacaucaaggaagat

SEQ ID NO: 21340 - RNA, 14 nt, Artificial Sequence
  source: /note="Description of Artificial Sequence: Synthetic oligonucleotide"
  source: /note="RNA"
  source: /note="5' tri-ethylene glycol (TEG)"
  modified_base (1)..(1): bicyclic nucleic acid (BNA)
  modified_base (2)..(2): bicyclic nucleic acid (BNA)
  modified_base (3)..(3): 5-methyl modified nucleotide
  modified_base (6)..(6): 5-methyl modified nucleotide
  modified_base (13)..(13): bicyclic nucleic acid (BNA)
  modified_base (14)..(14): bicyclic nucleic acid (BNA)
aacaucaaggaaga

SEQ ID NO: 21341 - RNA, 13 nt, Artificial Sequence
  source: /note="Description of Artificial Sequence: Synthetic oligonucleotide"
  source: /note="RNA"
  source: /note="5' tri-ethylene glycol (TEG)"
  modified_base (1)..(1): bicyclic nucleic acid (BNA)
  modified_base (2)..(2): bicyclic nucleic acid (BNA)
  modified_base (3)..(3): 5-methyl modified nucleotide
  modified_base (6)..(6): 5-methyl modified nucleotide
  modified_base (12)..(12): bicyclic nucleic acid (BNA)
  modified_base (13)..(13): bicyclic nucleic acid (BNA)
aacaucaaggaag

SEQ ID NO: 21342 - RNA, 25 nt, Artificial Sequence
  source: /note="Description of Artificial Sequence: Synthetic oligonucleotide"
  source: /note="RNA"
  source: /note="5' tri-ethylene glycol (TEG)"
  modified_base (1)..(1): bicyclic nucleic acid (BNA)
  modified_base (2)..(2): 5-methyl bicyclic nucleic acid
  modified_base (5)..(5): 5-methyl modified nucleotide
  modified_base (17)..(17): 5-methyl modified nucleotide
  modified_base (22)..(22): 5-methyl modified nucleotide
  modified_base (24)..(24): bicyclic nucleic acid (BNA)
  modified_base (25)..(25): bicyclic nucleic acid (BNA)
acaucaaggaagauggcauuucuag

SEQ ID NO: 21343 - DNA, 24 bp, Artificial Sequence
  source: /note="Description of Artificial Sequence: Synthetic oligonucleotide"
  source: /note="Description of Combined DNA/RNA Molecule: Synthetic oligonucleotide"
  source: /note="DNA/RNA"
  source: /note="5' tri-ethylene glycol (TEG)"
  modified_base (1)..(1): bicyclic nucleic acid (BNA)
  modified_base (2)..(2): 5-methyl bicyclic nucleic acid
  modified_base (5)..(5): 5-methyl modified nucleotide
  modified_base (17)..(17): 5-methyl modified nucleotide
  modified_base (22)..(22): 5-methyl modified nucleotide
  modified_base (23)..(23): bicyclic nucleic acid (BNA)
  modified_base (24)..(24): bicyclic nucleic acid (BNA)
acaucaaggaagauggcauuucta

SEQ ID NO: 21344 - DNA, 23 bp, Artificial Sequence
  source: /note="Description of Artificial Sequence: Synthetic oligonucleotide"
  source: /note="Description of Combined DNA/RNA Molecule: Synthetic oligonucleotide"
  source: /note="DNA/RNA"
  source: /note="5' tri-ethylene glycol (TEG)"
  modified_base (1)..(1): bicyclic nucleic acid (BNA)
  modified_base (2)..(2): 5-methyl bicyclic nucleic acid
  modified_base (5)..(5): 5-methyl modified nucleotide
  modified_base (17)..(17): 5-methyl modified nucleotide
  modified_base (22)..(22): 5-methyl bicyclic nucleic acid
  modified_base (23)..(23): bicyclic nucleic acid (BNA)
acaucaaggaagauggcauuuct

SEQ ID NO: 21345 - DNA, 22 bp, Artificial Sequence
  source: /note="Description of Artificial Sequence: Synthetic oligonucleotide"
  source: /note="Description of Combined DNA/RNA Molecule: Synthetic oligonucleotide"
  source: /note="DNA/RNA"
  source: /note="5' tri-ethylene glycol (TEG)"
  modified_base (1)..(1): bicyclic nucleic acid (BNA)
  modified_base (2)..(2): 5-methyl bicyclic nucleic acid
  modified_base (5)..(5): 5-methyl modified nucleotide
  modified_base (17)..(17): 5-methyl modified nucleotide
  modified_base (21)..(21): bicyclic nucleic acid (BNA)
  modified_base (22)..(22): 5-methyl bicyclic nucleic acid
acaucaaggaagauggcauutc

SEQ ID NO: 21346 - DNA, 21 bp, Artificial Sequence
  source: /note="Description of Artificial Sequence: Synthetic oligonucleotide"
  source: /note="Description of Combined DNA/RNA Molecule: Synthetic oligonucleotide"
  source: /note="DNA/RNA"
  source: /note="5' tri-ethylene glycol (TEG)"
  modified_base (1)..(1): bicyclic nucleic acid (BNA)
  modified_base (2)..(2): 5-methyl bicyclic nucleic acid
  modified_base (5)..(5): 5-methyl modified nucleotide
  modified_base (17)..(17): 5-methyl modified nucleotide
  modified_base (20)..(20): bicyclic nucleic acid (BNA)
  modified_base (21)..(21): bicyclic nucleic acid (BNA)
acaucaaggaagauggcautt

SEQ ID NO: 21347 - DNA, 20 bp, Artificial Sequence
  source: /note="Description of Artificial Sequence: Synthetic oligonucleotide"
  source: /note="Description of Combined DNA/RNA Molecule: Synthetic oligonucleotide"
  source: /note="DNA/RNA"
  source: /note="5' tri-ethylene glycol (TEG)"
  modified_base (1)..(1): bicyclic nucleic acid (BNA)
  modified_base (2)..(2): 5-methyl bicyclic nucleic acid
  modified_base (5)..(5): 5-methyl modified nucleotide
  modified_base (17)..(17): 5-methyl modified nucleotide
  modified_base (19)..(19): bicyclic nucleic acid (BNA)
  modified_base (20)..(20): bicyclic nucleic acid (BNA)
acaucaaggaagauggcatt

SEQ ID NO: 21348 - DNA, 19 bp, Artificial Sequence
  source: /note="Description of Artificial Sequence: Synthetic oligonucleotide"
  source: /note="Description of Combined DNA/RNA Molecule: Synthetic oligonucleotide"
  source: /note="DNA/RNA"
  source: /note="5' tri-ethylene glycol (TEG)"
  modified_base (1)..(1): bicyclic nucleic acid (BNA)
  modified_base (2)..(2): 5-methyl bicyclic nucleic acid
  modified_base (5)..(5): 5-methyl modified nucleotide
  modified_base (17)..(17): 5-methyl modified nucleotide
  modified_base (18)..(18): bicyclic nucleic acid (BNA)
  modified_base (19)..(19): bicyclic nucleic acid (BNA)
acaucaaggaagauggcat

SEQ ID NO: 21349 - RNA, 18 nt, Artificial Sequence
  source: /note="Description of Artificial Sequence: Synthetic oligonucleotide"
  source: /note="RNA"
  source: /note="5' tri-ethylene glycol (TEG)"
  modified_base (1)..(1): bicyclic nucleic acid (BNA)
  modified_base (2)..(2): 5-methyl bicyclic nucleic acid
  modified_base (5)..(5): 5-methyl modified nucleotide
  modified_base (17)..(17): 5-methyl bicyclic nucleic acid
  modified_base (18)..(18): bicyclic nucleic acid (BNA)
acaucaaggaagauggca

SEQ ID NO: 21350 - RNA, 17 nt, Artificial Sequence
  source: /note="Description of Artificial Sequence: Synthetic oligonucleotide"
  source: /note="RNA"
  source: /note="5' tri-ethylene glycol (TEG)"
  modified_base (1)..(1): bicyclic nucleic acid (BNA)
  modified_base (2)..(2): 5-methyl bicyclic nucleic acid
  modified_base (5)..(5): 5-methyl modified nucleotide
  modified_base (16)..(16): bicyclic nucleic acid (BNA)
  modified_base (17)..(17): 5-methyl bicyclic nucleic acid
acaucaaggaagauggc

SEQ ID NO: 21351 - RNA, 16 nt, Artificial Sequence
  source: /note="Description of Artificial Sequence: Synthetic oligonucleotide"
  source: /note="RNA"
  source: /note="5' tri-ethylene glycol (TEG)"
  modified_base (1)..(1): bicyclic nucleic acid (BNA)
  modified_base (2)..(2): 5-methyl bicyclic nucleic acid
  modified_base (5)..(5): 5-methyl modified nucleotide
  modified_base (15)..(15): bicyclic nucleic acid (BNA)
  modified_base (16)..(16): bicyclic nucleic acid (BNA)
acaucaaggaagaugg

SEQ ID NO: 21352 - DNA, 15 bp, Artificial Sequence
  source: /note="Description of Artificial Sequence: Synthetic oligonucleotide"
  source: /note="Description of Combined DNA/RNA Molecule: Synthetic oligonucleotide"
  source: /note="DNA/RNA"
  source: /note="5' tri-ethylene glycol (TEG)"
  modified_base (1)..(1): bicyclic nucleic acid (BNA)
  modified_base (2)..(2): 5-methyl bicyclic nucleic acid
  modified_base (5)..(5): 5-methyl modified nucleotide
  modified_base (14)..(14): bicyclic nucleic acid (BNA)
  modified_base (15)..(15): bicyclic nucleic acid (BNA)
acaucaaggaagatg

SEQ ID NO: 21353 - DNA, 14 bp, Artificial Sequence
  source: /note="Description of Artificial Sequence: Synthetic oligonucleotide"
  source: /note="Description of Combined DNA/RNA Molecule: Synthetic oligonucleotide"
  source: /note="DNA/RNA"
  source: /note="5' tri-ethylene glycol (TEG)"
  modified_base (1)..(1): bicyclic nucleic acid (BNA)
  modified_base (2)..(2): 5-methyl bicyclic nucleic acid
  modified_base (5)..(5): 5-methyl modified nucleotide
  modified_base (13)..(13): bicyclic nucleic acid (BNA)
  modified_base (14)..(14): bicyclic nucleic acid (BNA)
acaucaaggaagat

SEQ ID NO: 21354 - RNA, 13 nt, Artificial Sequence
  source: /note="Description of Artificial Sequence: Synthetic oligonucleotide"
  source: /note="RNA"
  source: /note="5' tri-ethylene glycol (TEG)"
  modified_base (1)..(1): bicyclic nucleic acid (BNA)
  modified_base (2)..(2): 5-methyl bicyclic nucleic acid
  modified_base (5)..(5): 5-methyl modified nucleotide
  modified_base (12)..(12): bicyclic nucleic acid (BNA)
  modified_base (13)..(13): bicyclic nucleic acid (BNA)
acaucaaggaaga

SEQ ID NO: 21355 - RNA, 12 nt, Artificial Sequence
  source: /note="Description of Artificial Sequence: Synthetic oligonucleotide"
  source: /note="RNA"
  source: /note="5' tri-ethylene glycol (TEG)"
  modified_base (1)..(1): bicyclic nucleic acid (BNA)
  modified_base (2)..(2): 5-methyl bicyclic nucleic acid
  modified_base (5)..(5): 5-methyl modified nucleotide
  modified_base (11)..(11): bicyclic nucleic acid (BNA)
  modified_base (12)..(12): bicyclic nucleic acid (BNA)
acaucaaggaag

SEQ ID NO: 21356 - RNA, 24 nt, Artificial Sequence
  source: /note="Description of Artificial Sequence: Synthetic oligonucleotide"
  source: /note="RNA"
  source: /note="5' tri-ethylene glycol (TEG)"
  modified_base (1)..(1): 5-methyl bicyclic nucleic acid
  modified_base (2)..(2): bicyclic nucleic acid (BNA)
  modified_base (4)..(4): 5-methyl modified nucleotide
  modified_base (16)..(16): 5-methyl modified nucleotide
  modified_base (21)..(21): 5-methyl modified nucleotide
  modified_base (23)..(23): bicyclic nucleic acid (BNA)
  modified_base (24)..(24): bicyclic nucleic acid (BNA)
caucaaggaagauggcauuucuag

SEQ ID NO: 21357 - DNA, 23 bp, Artificial Sequence
  source: /note="Description of Artificial Sequence: Synthetic oligonucleotide"
  source: /note="Description of Combined DNA/RNA Molecule: Synthetic oligonucleotide"
  source: /note="DNA/RNA"
  source: /note="5' tri-ethylene glycol (TEG)"
  modified_base (1)..(1): 5-methyl bicyclic nucleic acid
  modified_base (2)..(2): bicyclic nucleic acid (BNA)
  modified_base (4)..(4): 5-methyl modified nucleotide
  modified_base (16)..(16): 5-methyl modified nucleotide
  modified_base (21)..(21): 5-methyl modified nucleotide
  modified_base (22)..(22): bicyclic nucleic acid (BNA)
  modified_base (23)..(23): bicyclic nucleic acid (BNA)
caucaaggaagauggcauuucta

SEQ ID NO: 21358 - DNA, 22 bp, Artificial Sequence
  source: /note="Description of Artificial Sequence: Synthetic oligonucleotide"
  source: /note="Description of Combined DNA/RNA Molecule: Synthetic oligonucleotide"
  source: /note="DNA/RNA"
  source: /note="5' tri-ethylene glycol (TEG)"
  modified_base (1)..(1): 5-methyl bicyclic nucleic acid
  modified_base (2)..(2): bicyclic nucleic acid (BNA)
  modified_base (4)..(4): 5-methyl modified nucleotide
  modified_base (16)..(16): 5-methyl modified nucleotide
  modified_base (21)..(21): 5-methyl bicyclic nucleic acid
  modified_base (22)..(22): bicyclic nucleic acid (BNA)
caucaaggaagauggcauuuct

SEQ ID NO: 21359 - DNA, 21 bp, Artificial Sequence
  source: /note="Description of Artificial Sequence: Synthetic oligonucleotide"
  source: /note="Description of Combined DNA/RNA Molecule: Synthetic oligonucleotide"
  source: /note="DNA/RNA"
  source: /note="5' tri-ethylene glycol (TEG)"
  modified_base (1)..(1): 5-methyl bicyclic nucleic acid
  modified_base (2)..(2): bicyclic nucleic acid (BNA)
  modified_base (4)..(4): 5-methyl modified nucleotide
  modified_base (16)..(16): 5-methyl modified nucleotide
  modified_base (20)..(20): bicyclic nucleic acid (BNA)
  modified_base (21)..(21): 5-methyl bicyclic nucleic acid
caucaaggaagauggcauutc

SEQ ID NO: 21360 - DNA, 20 bp, Artificial Sequence
  source: /note="Description of Artificial Sequence: Synthetic oligonucleotide"
  source: /note="Description of Combined DNA/RNA Molecule: Synthetic oligonucleotide"
  source: /note="DNA/RNA"
  source: /note="5' tri-ethylene glycol (TEG)"
  modified_base (1)..(1): 5-methyl bicyclic nucleic acid
  modified_base (2)..(2): bicyclic nucleic acid (BNA)
  modified_base (4)..(4): 5-methyl modified nucleotide
  modified_base (16)..(16): 5-methyl modified nucleotide
  modified_base (19)..(19): bicyclic nucleic acid (BNA)
  modified_base (20)..(20): bicyclic nucleic acid (BNA)
caucaaggaagauggcautt

SEQ ID NO: 21361 - DNA, 19 bp, Artificial Sequence
  source: /note="Description of Artificial Sequence: Synthetic oligonucleotide"
  source: /note="Description of Combined DNA/RNA Molecule: Synthetic oligonucleotide"
  source: /note="DNA/RNA"
  source: /note="5' tri-ethylene glycol (TEG)"
  modified_base (1)..(1): 5-methyl bicyclic nucleic acid
  modified_base (2)..(2): bicyclic nucleic acid (BNA)
  modified_base (4)..(4): 5-methyl modified nucleotide
  modified_base (16)..(16): 5-methyl modified nucleotide
  modified_base (18)..(18): bicyclic nucleic acid (BNA)
  modified_base (19)..(19): bicyclic nucleic acid (BNA)
caucaaggaagauggcatt

SEQ ID NO: 21362 - DNA, 18 bp, Artificial Sequence
  source: /note="Description of Artificial Sequence: Synthetic oligonucleotide"
  source: /note="Description of Combined DNA/RNA Molecule: Synthetic oligonucleotide"
  source: /note="DNA/RNA"
  source: /note="5' tri-ethylene glycol (TEG)"
  modified_base (1)..(1): 5-methyl bicyclic nucleic acid
  modified_base (2)..(2): bicyclic nucleic acid (BNA)
  modified_base (4)..(4): 5-methyl modified nucleotide
  modified_base (16)..(16): 5-methyl modified nucleotide
  modified_base (17)..(17): bicyclic nucleic acid (BNA)
  modified_base (18)..(18): bicyclic nucleic acid (BNA)
caucaaggaagauggcat

SEQ ID NO: 21363 - RNA, 17 nt, Artificial Sequence
  source: /note="Description of Artificial Sequence: Synthetic oligonucleotide"
  source: /note="RNA"
  source: /note="5' tri-ethylene glycol (TEG)"
  modified_base (1)..(1): 5-methyl bicyclic nucleic acid
  modified_base (2)..(2): bicyclic nucleic acid (BNA)
  modified_base (4)..(4): 5-methyl modified nucleotide
  modified_base (16)..(16): 5-methyl bicyclic nucleic acid
  modified_base (17)..(17): bicyclic nucleic acid (BNA)
caucaaggaagauggca

SEQ ID NO: 21364 - RNA, 16 nt, Artificial Sequence
  source: /note="Description of Artificial Sequence: Synthetic oligonucleotide"
  source: /note="RNA"
  source: /note="5' tri-ethylene glycol (TEG)"
  modified_base (1)..(1): 5-methyl bicyclic nucleic acid
  modified_base (2)..(2): bicyclic nucleic acid (BNA)
  modified_base (4)..(4): 5-methyl modified nucleotide
  modified_base (15)..(15): bicyclic nucleic acid (BNA)
  modified_base (16)..(16): 5-methyl bicyclic nucleic acid
caucaaggaagauggc

SEQ ID NO: 21365 - RNA, 15 nt, Artificial Sequence
  source: /note="Description of Artificial Sequence: Synthetic oligonucleotide"
  source: /note="RNA"
  source: /note="5' tri-ethylene glycol (TEG)"
  modified_base (1)..(1): 5-methyl bicyclic nucleic acid
  modified_base (2)..(2): bicyclic nucleic acid (BNA)
  modified_base (4)..(4): 5-methyl modified nucleotide
  modified_base (14)..(14): bicyclic nucleic acid (BNA)
  modified_base (15)..(15): bicyclic nucleic acid (BNA)
caucaaggaagaugg

SEQ ID NO: 21366 - DNA, 14 bp, Artificial Sequence
  source: /note="Description of Artificial Sequence: Synthetic oligonucleotide"
  source: /note="Description of Combined DNA/RNA Molecule: Synthetic oligonucleotide"
  source: /note="DNA/RNA"
  source: /note="5' tri-ethylene glycol (TEG)"
  modified_base (1)..(1): 5-methyl bicyclic nucleic acid
  modified_base (2)..(2): bicyclic nucleic acid (BNA)
  modified_base (4)..(4): 5-methyl modified nucleotide
  modified_base (13)..(13): bicyclic nucleic acid (BNA)
  modified_base (14)..(14): bicyclic nucleic acid (BNA)
caucaaggaagatg

SEQ ID NO: 21367 - DNA, 13 bp, Artificial Sequence
  source: /note="Description of Artificial Sequence: Synthetic oligonucleotide"
  source: /note="Description of Combined DNA/RNA Molecule: Synthetic oligonucleotide"
  source: /note="DNA/RNA"
  source: /note="5' tri-ethylene glycol (TEG)"
  modified_base (1)..(1): 5-methyl bicyclic nucleic acid
  modified_base (2)..(2): bicyclic nucleic acid (BNA)
  modified_base (4)..(4): 5-methyl modified nucleotide
  modified_base (12)..(12): bicyclic nucleic acid (BNA)
  modified_base (13)..(13): bicyclic nucleic acid (BNA)
caucaaggaagat

SEQ ID NO: 21368 - RNA, 12 nt, Artificial Sequence
  source: /note="Description of Artificial Sequence: Synthetic oligonucleotide"
  source: /note="RNA"
  source: /note="5' tri-ethylene glycol (TEG)"
  modified_base (1)..(1): 5-methyl bicyclic nucleic acid
  modified_base (2)..(2): bicyclic nucleic acid (BNA)
  modified_base (4)..(4): 5-methyl modified nucleotide
  modified_base (11)..(11): bicyclic nucleic acid (BNA)
  modified_base (12)..(12): bicyclic nucleic acid (BNA)
caucaaggaaga

SEQ ID NO: 21369 - RNA, 11 nt, Artificial Sequence
  source: /note="Description of Artificial Sequence: Synthetic oligonucleotide"
  source: /note="RNA"
  source: /note="5' tri-ethylene glycol (TEG)"
  modified_base (1)..(1): 5-methyl bicyclic nucleic acid
  modified_base (2)..(2): bicyclic nucleic acid (BNA)
  modified_base (4)..(4): 5-methyl modified nucleotide
  modified_base (10)..(10): bicyclic nucleic acid (BNA)
  modified_base (11)..(11): bicyclic nucleic acid (BNA)
caucaaggaag

SEQ ID NO: 21370 - DNA, 23 bp, Artificial Sequence
  source: /note="Description of Artificial Sequence: Synthetic oligonucleotide"
  source: /note="Description of Combined DNA/RNA Molecule: Synthetic oligonucleotide"
  source: /note="DNA/RNA"
  source: /note="5' tri-ethylene glycol (TEG)"
  modified_base (1)..(1): bicyclic nucleic acid (BNA)
  modified_base (2)..(2): bicyclic nucleic acid (BNA)
  modified_base (3)..(3): 5-methyl modified nucleotide
  modified_base (15)..(15): 5-methyl modified nucleotide
  modified_base (20)..(20): 5-methyl modified nucleotide
  modified_base (22)..(22): bicyclic nucleic acid (BNA)
  modified_base (23)..(23): bicyclic nucleic acid (BNA)
atcaaggaagauggcauuucuag

SEQ ID NO: 21371 - DNA, 22 bp, Artificial Sequence
  source: /note="Description of Artificial Sequence: Synthetic oligonucleotide"
  source: /note="Description of Combined DNA/RNA Molecule: Synthetic oligonucleotide"
  source: /note="DNA/RNA"
  source: /note="5' tri-ethylene glycol (TEG)"
  modified_base (1)..(1): bicyclic nucleic acid (BNA)
  modified_base (2)..(2): bicyclic nucleic acid (BNA)
  modified_base (3)..(3): 5-methyl modified nucleotide
  modified_base (15)..(15): 5-methyl modified nucleotide
  modified_base (20)..(20): 5-methyl modified nucleotide
  modified_base (21)..(21): bicyclic nucleic acid (BNA)
  modified_base (22)..(22): bicyclic nucleic acid (BNA)
atcaaggaagauggcauuucta

SEQ ID NO: 21372 - DNA, 21 bp, Artificial Sequence
  source: /note="Description of Artificial Sequence: Synthetic oligonucleotide"
  source: /note="Description of Combined DNA/RNA Molecule: Synthetic oligonucleotide"
  source: /note="DNA/RNA"
  source: /note="5' tri-ethylene glycol (TEG)"
  modified_base (1)..(1): bicyclic nucleic acid (BNA)
  modified_base (2)..(2): bicyclic nucleic acid (BNA)
  modified_base (3)..(3): 5-methyl modified nucleotide
  modified_base (15)..(15): 5-methyl modified nucleotide
  modified_base (20)..(20): 5-methyl bicyclic nucleic acid
  modified_base (21)..(21): bicyclic nucleic acid (BNA)
atcaaggaagauggcauuuct

SEQ ID NO: 21373 - DNA, 20 bp, Artificial Sequence
  source: /note="Description of Artificial Sequence: Synthetic oligonucleotide"
  source: /note="Description of Combined DNA/RNA Molecule: Synthetic oligonucleotide"
  source: /note="DNA/RNA"
  source: /note="5' tri-ethylene glycol (TEG)"
  modified_base (1)..(1): bicyclic nucleic acid (BNA)
  modified_base (2)..(2): bicyclic nucleic acid (BNA)
  modified_base (3)..(3): 5-methyl modified nucleotide
  modified_base (15)..(15): 5-methyl modified nucleotide
  modified_base (19)..(19): bicyclic nucleic acid (BNA)
  modified_base (20)..(20): 5-methyl bicyclic nucleic acid
atcaaggaagauggcauutc

SEQ ID NO: 21374 - DNA, 19 bp, Artificial Sequence
  source: /note="Description of Artificial Sequence: Synthetic oligonucleotide"
  source: /note="Description of Combined DNA/RNA Molecule: Synthetic oligonucleotide"
  source: /note="DNA/RNA"
  source: /note="5' tri-ethylene glycol (TEG)"
  modified_base (1)..(1): bicyclic nucleic acid (BNA)
  modified_base (2)..(2): bicyclic nucleic acid (BNA)
  modified_base (3)..(3): 5-methyl modified nucleotide
  modified_base (15)..(15): 5-methyl modified nucleotide
  modified_base (18)..(18): bicyclic nucleic acid (BNA)
  modified_base (19)..(19): bicyclic nucleic acid (BNA)
atcaaggaagauggcautt

SEQ ID NO: 21375 - DNA, 18 bp, Artificial Sequence
  source: /note="Description of Artificial Sequence: Synthetic oligonucleotide"
  source: /note="Description of Combined DNA/RNA Molecule: Synthetic oligonucleotide"
  source: /note="DNA/RNA"
  source: /note="5' tri-ethylene glycol (TEG)"
  modified_base (1)..(1): bicyclic nucleic acid (BNA)
  modified_base (2)..(2): bicyclic nucleic acid (BNA)
  modified_base (3)..(3): 5-methyl modified nucleotide
  modified_base (15)..(15): 5-methyl modified nucleotide
  modified_base (17)..(17): bicyclic nucleic acid (BNA)
  modified_base (18)..(18): bicyclic nucleic acid (BNA)
atcaaggaagauggcatt

SEQ ID NO: 21376 - DNA, 17 bp, Artificial Sequence
  source: /note="Description of Artificial Sequence: Synthetic oligonucleotide"
  source: /note="Description of Combined DNA/RNA Molecule: Synthetic oligonucleotide"
  source: /note="DNA/RNA"
  source: /note="5' tri-ethylene glycol (TEG)"
  modified_base (1)..(1): bicyclic nucleic acid (BNA)
  modified_base (2)..(2): bicyclic nucleic acid (BNA)
  modified_base (3)..(3): 5-methyl modified nucleotide
  modified_base (15)..(15): 5-methyl modified nucleotide
  modified_base (16)..(16): bicyclic nucleic acid (BNA)
  modified_base (17)..(17): bicyclic nucleic acid (BNA)
atcaaggaagauggcat

SEQ ID NO: 21377 - DNA, 16 bp, Artificial Sequence
  source: /note="Description of Artificial Sequence: Synthetic oligonucleotide"
  source: /note="Description of Combined DNA/RNA Molecule: Synthetic oligonucleotide"
  source: /note="DNA/RNA"
  source: /note="5' tri-ethylene glycol (TEG)"
  modified_base (1)..(1): bicyclic nucleic acid (BNA)
  modified_base (2)..(2): bicyclic nucleic acid (BNA)
  modified_base (3)..(3): 5-methyl modified nucleotide
  modified_base (15)..(15): 5-methyl bicyclic nucleic acid
  modified_base (16)..(16): bicyclic nucleic acid (BNA)
atcaaggaagauggca

SEQ ID NO: 21378 - DNA, 15 bp, Artificial Sequence
  source: /note="Description of Artificial Sequence: Synthetic oligonucleotide"
  source: /note="Description of Combined DNA/RNA Molecule: Synthetic oligonucleotide"
  source: /note="DNA/RNA"
  source: /note="5' tri-ethylene glycol (TEG)"
  modified_base (1)..(1): bicyclic nucleic acid (BNA)
  modified_base (2)..(2): bicyclic nucleic acid (BNA)
  modified_base (3)..(3): 5-methyl modified nucleotide
  modified_base (14)..(14): bicyclic nucleic acid (BNA)
  modified_base (15)..(15): 5-methyl bicyclic nucleic acid
atcaaggaagauggc

SEQ ID NO: 21379 - DNA, 14 bp, Artificial Sequence
  source: /note="Description of Artificial Sequence: Synthetic oligonucleotide"
  source: /note="Description of Combined DNA/RNA Molecule: Synthetic oligonucleotide"
  source: /note="DNA/RNA"
  source: /note="5' tri-ethylene glycol (TEG)"
  modified_base (1)..(1): bicyclic nucleic acid (BNA)
  modified_base (2)..(2): bicyclic nucleic acid (BNA)
  modified_base (3)..(3): 5-methyl modified nucleotide
  modified_base (13)..(13): bicyclic nucleic acid (BNA)
  modified_base (14)..(14): bicyclic nucleic acid (BNA)
atcaaggaagaugg

SEQ ID NO: 21380 - DNA, 13 bp, Artificial Sequence
  source: /note="Description of Artificial Sequence: Synthetic oligonucleotide"
  source: /note="DNA/RNA"
  source: /note="5' tri-ethylene glycol (TEG)"
  modified_base (1)..(1): bicyclic nucleic acid (BNA)
  modified_base (2)..(2): bicyclic nucleic acid (BNA)
  modified_base (3)..(3): 5-methyl modified nucleotide
  modified_base (12)..(12): bicyclic nucleic acid (BNA)
  modified_base (13)..(13): bicyclic nucleic acid (BNA)
atcaaggaagatg

SEQ ID NO: 21381 - DNA, 12 bp, Artificial Sequence
  source: /note="Description of Artificial Sequence: Synthetic oligonucleotide"
  source: /note="DNA/RNA"
  source: /note="5' tri-ethylene glycol (TEG)"
  modified_base (1)..(1): bicyclic nucleic acid (BNA)
  modified_base (2)..(2): bicyclic nucleic acid (BNA)
  modified_base (3)..(3): 5-methyl modified nucleotide
  modified_base (11)..(11): bicyclic nucleic acid (BNA)
  modified_base (12)..(12): bicyclic nucleic acid (BNA)
atcaaggaagat

SEQ ID NO: 21382 - DNA, 11 bp, Artificial Sequence
  source: /note="Description of Artificial Sequence: Synthetic oligonucleotide"
  source: /note="DNA/RNA"
  source: /note="5' tri-ethylene glycol (TEG)"
  modified_base (1)..(1): bicyclic nucleic acid (BNA)
  modified_base (2)..(2): bicyclic nucleic acid (BNA)
  modified_base (3)..(3): 5-methyl modified nucleotide
  modified_base (10)..(10): bicyclic nucleic acid (BNA)
  modified_base (11)..(11): bicyclic nucleic acid (BNA)
atcaaggaaga

SEQ ID NO: 21383 - DNA, 10 bp, Artificial Sequence
  source: /note="Description of Artificial Sequence: Synthetic oligonucleotide"
  source: /note="DNA/RNA"
  source: /note="5' tri-ethylene glycol (TEG)"
  modified_base (1)..(1): bicyclic nucleic acid (BNA)
  modified_base (2)..(2): bicyclic nucleic acid (BNA)
  modified_base (3)..(3): 5-methyl modified nucleotide
  modified_base (9)..(9): bicyclic nucleic acid (BNA)
  modified_base (10)..(10): bicyclic nucleic acid (BNA)
atcaaggaag

SEQ ID NO: 21384 - DNA, 23 bp, Artificial Sequence
  source: /note="Description of Artificial Sequence: Synthetic oligonucleotide"
  source: /note="Description of Combined DNA/RNA Molecule: Synthetic oligonucleotide"
  source: /note="DNA/RNA"
  source: /note="5' tri-ethylene glycol (TEG)"
  modified_base (1)..(1): 5-methyl bicyclic nucleic acid
  modified_base (2)..(2): 5-methyl bicyclic nucleic acid
  modified_base (7)..(7): 5-methyl modified nucleotide
  modified_base (13)..(13): 5-methyl modified nucleotide
  modified_base (14)..(14): 5-methyl modified nucleotide
  modified_base (16)..(16): 5-methyl modified nucleotide
  modified_base (17)..(17): 5-methyl modified nucleotide
  modified_base (20)..(20): 5-methyl modified nucleotide
  modified_base (22)..(22): bicyclic nucleic acid (BNA)
  modified_base (23)..(23): 5-methyl bicyclic nucleic acid
ccagagcagguaccuccaacatc

SEQ ID NO: 21385 - RNA, 18 nt, Artificial Sequence
  source: /note="Description of Artificial Sequence: Synthetic oligonucleotide"
  source: /note="RNA"
  source: /note="5' tri-ethylene glycol (TEG)"
  modified_base (1)..(1): 5-methyl bicyclic nucleic acid
  modified_base (2)..(2): 5-methyl bicyclic nucleic acid
  modified_base (7)..(7): 5-methyl modified nucleotide
  modified_base (13)..(13): 5-methyl modified nucleotide
  modified_base (14)..(14): 5-methyl modified nucleotide
  modified_base (16)..(16): 5-methyl modified nucleotide
  modified_base (17)..(17): 5-methyl bicyclic nucleic acid
  modified_base (18)..(18): bicyclic nucleic acid (BNA)
ccagagcagguaccucca

SEQ ID NO: 21386 - DNA, 23 bp, Artificial Sequence
  source: /note="Description of Artificial Sequence: Synthetic oligonucleotide"
  source: /note="Description of Combined DNA/RNA Molecule: Synthetic oligonucleotide"
  source: /note="DNA/RNA"
  source: /note="5' tri-ethylene glycol (TEG)"
  modified_base (1)..(1): 5-methyl bicyclic nucleic acid
  modified_base (2)..(2): 5-methyl bicyclic nucleic acid
  modified_base (4)..(4): 5-methyl modified nucleotide
  modified_base (18)..(18): 5-methyl modified nucleotide
  modified_base (22)..(22): bicyclic nucleic acid (BNA)
  modified_base (23)..(23): bicyclic nucleic acid (BNA)
ccucugugauuuuauaacuugat

SEQ ID NO: 21387 - DNA, 17 bp, Artificial Sequence
  source: /note="Description of Artificial Sequence: Synthetic oligonucleotide"
  source: /note="Description of Combined DNA/RNA Molecule: Synthetic oligonucleotide"
  source: /note="DNA/RNA"
  source: /note="5' tri-ethylene glycol (TEG)"
  modified_base (1)..(1): bicyclic nucleic acid (BNA)
  modified_base (2)..(2): 5-methyl bicyclic nucleic acid
  modified_base (4)..(4): 5-methyl modified nucleotide
  modified_base (5)..(5): 5-methyl modified nucleotide
  modified_base (6)..(6): 5-methyl modified nucleotide
  modified_base (8)..(8): 5-methyl modified nucleotide
  modified_base (9)..(9): 5-methyl modified nucleotide
  modified_base (12)..(12): 5-methyl modified nucleotide
  modified_base (14)..(14): 5-methyl modified nucleotide
  modified_base (15)..(15): 5-methyl modified nucleotide
  modified_base (16)..(16): 5-methyl bicyclic nucleic acid
  modified_base (17)..(17): bicyclic nucleic acid (BNA)
tcacccaccaucaccct

SEQ ID NO: 21388 - DNA, 20 bp, Artificial Sequence
  source: /note="Description of Artificial Sequence: Synthetic oligonucleotide"
  source: /note="Description of Combined DNA/RNA Molecule: Synthetic oligonucleotide"
  source: /note="DNA/RNA"
  source: /note="5' tri-ethylene glycol (TEG)"
  modified_base (1)..(1): bicyclic nucleic acid (BNA)
  modified_base (2)..(2): bicyclic nucleic acid (BNA)
  modified_base (7)..(7): 5-methyl modified nucleotide
  modified_base (8)..(8): 5-methyl modified nucleotide
  modified_base (10)..(10): 5-methyl modified nucleotide
  modified_base (16)..(16): 5-methyl modified nucleotide
  modified_base (18)..(18): 5-methyl modified nucleotide
  modified_base (19)..(19): 5-methyl bicyclic nucleic acid
  modified_base (20)..(20): 5-methyl bicyclic nucleic acid
tgauauccucaaggucaccc

SEQ ID NO: 21389 - DNA, 22 bp, Artificial Sequence
  source: /note="Description of Artificial Sequence: Synthetic oligonucleotide"
  source: /note="Description of Combined DNA/RNA Molecule: Synthetic oligonucleotide"
  source: /note="DNA/RNA"
  source: /note="5' tri-ethylene glycol (TEG)"
  modified_base (1)..(1): 5-methyl bicyclic nucleic acid
  modified_base (2)..(2): bicyclic nucleic acid (BNA)
  modified_base (4)..(4): 5-methyl modified nucleotide
  modified_base (13)..(13): 5-methyl modified nucleotide
  modified_base (16)..(16): 5-methyl modified nucleotide
  modified_base (18)..(18): 5-methyl modified nucleotide
  modified_base (21)..(21): bicyclic nucleic acid (BNA)
  modified_base (22)..(22): bicyclic nucleic acid (BNA)
ctgcuugaugaucaucucgutg

SEQ ID NO: 21390 - DNA, 18 bp, Artificial Sequence
  source: /note="Description of Artificial Sequence: Synthetic oligonucleotide"
  source: /note="Description of Combined DNA/RNA Molecule: Synthetic oligonucleotide"
  source: /note="DNA/RNA"
  source: /note="5' tri-ethylene glycol (TEG)"
  modified_base (1)..(1): 5-methyl bicyclic nucleic acid
  modified_base (2)..(2): bicyclic nucleic acid (BNA)
  modified_base (4)..(4): 5-methyl modified nucleotide
  modified_base (13)..(13): 5-methyl modified nucleotide
  modified_base (16)..(16): 5-methyl modified nucleotide
  modified_base (17)..(17): bicyclic nucleic acid (BNA)
  modified_base (18)..(18): 5-methyl bicyclic nucleic acid
ctgcuugaugaucauctc

SEQ ID NO: 21391 - DNA, 19 bp, Artificial Sequence
  source: /note="Description of Artificial Sequence: Synthetic oligonucleotide"
  source: /note="Description of Combined DNA/RNA Molecule: Synthetic oligonucleotide"
  source: /note="DNA/RNA"
  source: /note="5' tri-ethylene glycol (TEG)"
  modified_base (1)..(1): bicyclic nucleic acid (BNA)
  modified_base (2)..(2): bicyclic nucleic acid (BNA)
  modified_base (5)..(5): 5-methyl modified nucleotide
  modified_base (6)..(6): 5-methyl modified nucleotide
  modified_base (14)..(14): 5-methyl modified nucleotide
  modified_base (15)..(15): 5-methyl modified nucleotide
  modified_base (17)..(17): 5-methyl modified nucleotide
  modified_base (18)..(18): bicyclic nucleic acid (BNA)
  modified_base (19)..(19): bicyclic nucleic acid (BNA)
gtuuccuuaguaaccacag

SEQ ID NO: 21392 - DNA, 17 bp, Artificial Sequence
  source: /note="Description of Artificial Sequence: Synthetic oligonucleotide"
  source: /note="Description of Combined DNA/RNA Molecule: Synthetic oligonucleotide"
  source: /note="DNA/RNA"
  source: /note="5' tri-ethylene glycol (TEG)"
  modified_base (1)..(1): bicyclic nucleic acid (BNA)
  modified_base (2)..(2): bicyclic nucleic acid (BNA)
  modified_base (5)..(5): 5-methyl modified nucleotide
  modified_base (6)..(6): 5-methyl modified nucleotide
  modified_base (14)..(14): 5-methyl modified nucleotide
  modified_base (15)..(15): 5-methyl modified nucleotide
  modified_base (16)..(16): bicyclic nucleic acid (BNA)
  modified_base (17)..(17): 5-methyl bicyclic nucleic acid
gtuuccuuaguaaccac

SEQ ID NO: 21393 - DNA, 20 bp, Artificial Sequence
  source: /note="Description of Artificial Sequence: Synthetic oligonucleotide"
  source: /note="Description of Combined DNA/RNA Molecule: Synthetic oligonucleotide"
  source: /note="DNA/RNA"
  modified_base (1)..(1): bicyclic nucleic acid (BNA)
  modified_base (2)..(2): 5-methyl bicyclic nucleic acid
  modified_base (14)..(14): 5-methyl modified nucleotide
  modified_base (19)..(19): 5-methyl bicyclic nucleic acid
  modified_base (20)..(20): bicyclic nucleic acid (BNA)
  source: /note="3' tri-ethylene glycol (TEG)"
tcaaggaagauggcauuuct

SEQ ID NO: 21394 - DNA, 22 bp, Artificial Sequence
  source: /note="Description of Artificial Sequence: Synthetic oligonucleotide"
  source: /note="Description of Combined DNA/RNA Molecule: Synthetic oligonucleotide"
  source: /note="DNA/RNA"
  modified_base (1)..(1): bicyclic nucleic acid (BNA)
  modified_base (2)..(2): 5-methyl bicyclic nucleic acid
  modified_base (14)..(14): 5-methyl modified nucleotide
  modified_base (19)..(19): 5-methyl modified nucleotide
  modified_base (21)..(21): bicyclic nucleic acid (BNA)
  modified_base (22)..(22): bicyclic nucleic acid (BNA)
  source: /note="3' tri-ethylene glycol (TEG)"
tcaaggaagauggcauuucuag

SEQ ID NO: 21395 - RNA, 18 nt, Artificial Sequence
  source: /note="Description of Artificial Sequence: Synthetic oligonucleotide"
  source: /note="RNA"
  modified_base (1)..(1): bicyclic nucleic acid (BNA)
  modified_base (2)..(2): bicyclic nucleic acid (BNA)
  modified_base (9)..(9): 5-methyl modified nucleotide
  modified_base (13)..(13): 5-methyl modified nucleotide
  modified_base (14)..(14): 5-methyl modified nucleotide
  modified_base (17)..(17): bicyclic nucleic acid (BNA)
  modified_base (18)..(18): 5-methyl bicyclic nucleic acid
  source: /note="3' tri-ethylene glycol (TEG)"
gguaaguucuguccaagc

SEQ ID NO: 21396 - DNA, 18 bp, Artificial Sequence
  source: /note="Description of Artificial Sequence: Synthetic oligonucleotide"
  source: /note="Description of Combined DNA/RNA Molecule: Synthetic oligonucleotide"
  source: /note="DNA/RNA"
  modified_base (1)..(1): bicyclic nucleic acid (BNA)
  modified_base (2)..(2): bicyclic nucleic acid (BNA)
  modified_base (8)..(8): 5-methyl modified nucleotide
  modified_base (12)..(12): 5-methyl modified nucleotide
  modified_base (13)..(13): 5-methyl modified nucleotide
  modified_base (17)..(17): 5-methyl bicyclic nucleic acid
  modified_base (18)..(18): 5-methyl bicyclic nucleic acid
  source: /note="3' tri-ethylene glycol (TEG)"
gtaaguucuguccaagcc

SEQ ID NO: 21397 - RNA, 18 nt, Artificial Sequence
  source: /note="Description of Artificial Sequence: Synthetic oligonucleotide"
  source: /note="RNA"
  modified_base (1)..(1): bicyclic nucleic acid (BNA)
  modified_base (2)..(2): bicyclic nucleic acid (BNA)
  modified_base (4)..(4): 5-methyl modified nucleotide
  modified_base (13)..(13): 5-methyl modified nucleotide
  modified_base (17)..(17): 5-methyl bicyclic nucleic acid
  modified_base (18)..(18): 5-methyl bicyclic nucleic acid
  source: /note="3' tri-ethylene glycol (TEG)"
agucgguaaguucugucc

SEQ ID NO: 21398 - DNA, 18 bp, Artificial Sequence
  source: /note="Description of Artificial Sequence: Synthetic oligonucleotide"
  source: /note="Description of Combined DNA/RNA Molecule: Synthetic oligonucleotide"
  source: /note="DNA/RNA"
  modified_base (1)..(1): 5-methyl bicyclic nucleic acid
  modified_base (2)..(2): bicyclic nucleic acid (BNA)
  modified_base (5)..(5): 5-methyl modified nucleotide
  modified_base (6)..(6): 5-methyl modified nucleotide
  modified_base (10)..(10): 5-methyl modified nucleotide
  modified_base (11)..(11): 5-methyl modified nucleotide
  modified_base (12)..(12): 5-methyl modified nucleotide
  modified_base (17)..(17): bicyclic nucleic acid (BNA)
  modified_base (18)..(18): bicyclic nucleic acid (BNA)
  source: /note="3' tri-ethylene glycol (TEG)"
ctguccaagcccgguuga

SEQ ID NO: 21399 - DNA, 15 bp, Artificial Sequence
  source: /note="Description of Artificial Sequence: Synthetic oligonucleotide"
  source: /note="Description of Combined DNA/RNA Molecule: Synthetic oligonucleotide"
  source: /note="DNA/RNA"
  modified_base (1)..(1): bicyclic nucleic acid (BNA)
  modified_base (2)..(2): bicyclic nucleic acid (BNA)
  modified_base (7)..(7): 5-methyl modified nucleotide
  modified_base (11)..(11): 5-methyl modified nucleotide
  modified_base (12)..(12): 5-methyl modified nucleotide
  modified_base (14)..(14): bicyclic nucleic acid (BNA)
  modified_base (15)..(15): bicyclic nucleic acid (BNA)
  source: /note="3' tri-ethylene glycol (TEG)"
taaguucuguccaag

SEQ ID NO: 21400 - DNA, 20 bp, Artificial Sequence
  source: /note="Description of Artificial Sequence: Synthetic oligonucleotide"
  source: /note="Description of Combined DNA/RNA Molecule: Synthetic oligonucleotide"
  source: /note="DNA/RNA"
  modified_base (1)..(1): bicyclic nucleic acid (BNA)
  modified_base (2)..(2): bicyclic nucleic acid (BNA)
  modified_base (3)..(3): 5-methyl modified nucleotide
  modified_base (7)..(7): 5-methyl modified nucleotide
  modified_base (8)..(8): 5-methyl modified nucleotide
  modified_base (12)..(12): 5-methyl modified nucleotide
  modified_base (13)..(13): 5-methyl modified nucleotide
  modified_base (14)..(14): 5-methyl modified nucleotide
  modified_base (19)..(19): bicyclic nucleic acid (BNA)
  modified_base (20)..(20): bicyclic nucleic acid (BNA)
  source: /note="3' tri-ethylene glycol (TEG)"
ttcuguccaagcccgguuga

SEQ ID NO: 21401 - DNA, 19 bp, Artificial Sequence
  source: /note="Description of Artificial Sequence: Synthetic oligonucleotide"
  source: /note="Description of Combined DNA/RNA Molecule: Synthetic oligonucleotide"
  source: /note="DNA/RNA"
  modified_base (1)..(1): bicyclic nucleic acid (BNA)
  modified_base (2)..(2): bicyclic nucleic acid (BNA)
  modified_base (3)..(3): 5-methyl modified nucleotide
  modified_base (7)..(7): 5-methyl modified nucleotide
  modified_base (8)..(8): 5-methyl modified nucleotide
  modified_base (12)..(12): 5-methyl modified nucleotide
  modified_base (13)..(13): 5-methyl modified nucleotide
  modified_base (14)..(14): 5-methyl modified nucleotide
  modified_base (18)..(18): bicyclic nucleic acid (BNA)
  modified_base (19)..(19): bicyclic nucleic acid (BNA)
  source: /note="3' tri-ethylene glycol (TEG)"
ttcuguccaagcccggutg

SEQ ID NO: 21402 - DNA, 18 bp, Artificial Sequence
  source: /note="Description of Artificial Sequence: Synthetic oligonucleotide"
  source: /note="Description of Combined DNA/RNA Molecule: Synthetic oligonucleotide"
  source: /note="DNA/RNA"
  modified_base (1)..(1): bicyclic nucleic acid (BNA)
  modified_base (2)..(2): bicyclic nucleic acid (BNA)
  modified_base (3)..(3): 5-methyl modified nucleotide
  modified_base (7)..(7): 5-methyl modified nucleotide
  modified_base (8)..(8): 5-methyl modified nucleotide
  modified_base (12)..(12): 5-methyl modified nucleotide
  modified_base (13)..(13): 5-methyl modified nucleotide
  modified_base (14)..(14): 5-methyl modified nucleotide
  modified_base (17)..(17): bicyclic nucleic acid (BNA)
  modified_base (18)..(18): bicyclic nucleic acid (BNA)
  source: /note="3' tri-ethylene glycol (TEG)"
ttcuguccaagcccggtt

SEQ ID NO: 21403 - DNA, 17 bp, Artificial Sequence
  source: /note="Description of Artificial Sequence: Synthetic oligonucleotide"
  source: /note="Description of Combined DNA/RNA Molecule: Synthetic oligonucleotide"
  source: /note="DNA/RNA"
  modified_base (1)..(1): bicyclic nucleic acid (BNA)
  modified_base (2)..(2): bicyclic nucleic acid (BNA)
  modified_base (3)..(3): 5-methyl modified nucleotide
  modified_base (7)..(7): 5-methyl modified nucleotide
  modified_base (8)..(8): 5-methyl modified nucleotide
  modified_base (12)..(12): 5-methyl modified nucleotide
  modified_base (13)..(13): 5-methyl modified nucleotide
  modified_base (14)..(14): 5-methyl modified nucleotide
  modified_base (16)..(16): bicyclic nucleic acid (BNA)
  modified_base (17)..(17): bicyclic nucleic acid (BNA)
  source: /note="3' tri-ethylene glycol (TEG)"
ttcuguccaagcccggt

SEQ ID NO: 21404 - DNA, 16 bp, Artificial Sequence
  source: /note="Description of Artificial Sequence: Synthetic oligonucleotide"
  source: /note="Description of Combined DNA/RNA Molecule: Synthetic oligonucleotide"
  source: /note="DNA/RNA"
  modified_base (1)..(1): bicyclic nucleic acid (BNA)
  modified_base (2)..(2): bicyclic nucleic acid (BNA)
  modified_base (3)..(3): 5-methyl modified nucleotide
  modified_base (7)..(7): 5-methyl modified nucleotide
  modified_base (8)..(8): 5-methyl modified nucleotide
  modified_base (12)..(12): 5-methyl modified nucleotide
  modified_base (13)..(13): 5-methyl modified nucleotide
  modified_base (14)..(14): 5-methyl modified nucleotide
  modified_base (15)..(15): bicyclic nucleic acid (BNA)
  modified_base (16)..(16): bicyclic nucleic acid (BNA)
  source: /note="3' tri-ethylene glycol (TEG)"
ttcuguccaagcccgg

SEQ ID NO: 21405 - DNA, 15 bp, Artificial Sequence
  source: /note="Description of Artificial Sequence: Synthetic oligonucleotide"
  source: /note="Description of Combined DNA/RNA Molecule: Synthetic oligonucleotide"
  source: /note="DNA/RNA"
  modified_base (1)..(1): bicyclic nucleic acid (BNA)
  modified_base (2)..(2): bicyclic nucleic acid (BNA)
  modified_base (3)..(3): 5-methyl modified nucleotide
  modified_base (7)..(7): 5-methyl modified nucleotide
  modified_base (8)..(8): 5-methyl modified nucleotide
  modified_base (12)..(12): 5-methyl modified nucleotide
  modified_base (13)..(13): 5-methyl modified nucleotide
  modified_base (14)..(14): 5-methyl bicyclic nucleic acid
  modified_base (15)..(15): bicyclic nucleic acid (BNA)
  source: /note="3' tri-ethylene glycol (TEG)"
ttcuguccaagcccg

SEQ ID NO: 21406 - DNA, 14 bp, Artificial Sequence
  source: /note="Description of Artificial Sequence: Synthetic oligonucleotide"
  source: /note="Description of Combined DNA/RNA Molecule: Synthetic oligonucleotide"
  source: /note="DNA/RNA"
  modified_base (1)..(1): bicyclic nucleic acid (BNA)
  modified_base (2)..(2): bicyclic nucleic acid (BNA)
  modified_base (3)..(3): 5-methyl modified nucleotide
  modified_base (7)..(7): 5-methyl modified nucleotide
  modified_base (8)..(8): 5-methyl modified nucleotide
  modified_base (12)..(12): 5-methyl modified nucleotide
  modified_base (13)..(13): 5-methyl bicyclic nucleic acid
  modified_base (14)..(14): 5-methyl bicyclic nucleic acid
  source: /note="3' tri-ethylene glycol (TEG)"
ttcuguccaagccc

SEQ ID NO: 21407 - DNA, 13 bp, Artificial Sequence
  source: /note="Description of Artificial Sequence: Synthetic oligonucleotide"
  source: /note="Description of Combined DNA/RNA Molecule: Synthetic oligonucleotide"
  source: /note="DNA/RNA"
  modified_base (1)..(1): bicyclic nucleic acid (BNA)
  modified_base (2)..(2): bicyclic nucleic acid (BNA)
  modified_base (3)..(3): 5-methyl modified nucleotide
  modified_base (7)..(7): 5-methyl modified nucleotide
  modified_base (8)..(8): 5-methyl modified nucleotide
  modified_base (12)..(12): 5-methyl bicyclic nucleic acid
  modified_base (13)..(13): 5-methyl bicyclic nucleic acid
  source: /note="3' tri-ethylene glycol (TEG)"
ttcuguccaagcc

SEQ ID NO: 21408 - DNA, 12 bp, Artificial Sequence
  source: /note="Description of Artificial Sequence: Synthetic oligonucleotide"
  source: /note="Description of Combined DNA/RNA Molecule: Synthetic oligonucleotide"
  source: /note="DNA/RNA"
  modified_base (1)..(1): bicyclic nucleic acid (BNA)
  modified_base (2)..(2): bicyclic nucleic acid (BNA)
  modified_base (3)..(3): 5-methyl modified nucleotide
  modified_base (7)..(7): 5-methyl modified nucleotide
  modified_base (8)..(8): 5-methyl modified nucleotide
  modified_base (11)..(11): bicyclic nucleic acid (BNA)
  modified_base (12)..(12): 5-methyl bicyclic nucleic acid
  source: /note="3' tri-ethylene glycol (TEG)"
ttcuguccaagc

SEQ ID NO: 21409 - DNA, 11 bp, Artificial Sequence
  source: /note="Description of Artificial Sequence: Synthetic oligonucleotide"
  source: /note="Description of Combined DNA/RNA Molecule: Synthetic oligonucleotide"
  source: /note="DNA/RNA"
  modified_base (1)..(1): bicyclic nucleic acid (BNA)
  modified_base (2)..(2): bicyclic nucleic acid (BNA)
  modified_base (3)..(3): 5-methyl modified nucleotide
  modified_base (7)..(7): 5-methyl modified nucleotide
  modified_base (8)..(8): 5-methyl modified nucleotide
  modified_base (10)..(10): bicyclic nucleic acid (BNA)
  modified_base (11)..(11): bicyclic nucleic acid (BNA)
  source: /note="3' tri-ethylene glycol (TEG)"
ttcuguccaag

SEQ ID NO: 21410 - DNA, 10 bp, Artificial Sequence
  source: /note="Description of Artificial Sequence: Synthetic oligonucleotide"
  source: /note="Description of Combined DNA/RNA Molecule: Synthetic oligonucleotide"
  source: /note="DNA/RNA"
  modified_base (1)..(1): bicyclic nucleic acid (BNA)
  modified_base (2)..(2): bicyclic nucleic acid (BNA)
  modified_base (3)..(3): 5-methyl modified nucleotide
  modified_base (7)..(7): 5-methyl modified nucleotide
  modified_base (8)..(8): 5-methyl modified nucleotide
  modified_base (9)..(9): bicyclic nucleic acid (BNA)
  modified_base (10)..(10): bicyclic nucleic acid (BNA)
  source: /note="3' tri-ethylene glycol (TEG)"
ttcuguccaa

SEQ ID NO: 21411 - DNA, 9 bp, Artificial Sequence
  source: /note="Description of Artificial Sequence: Synthetic oligonucleotide"
  source: /note="Description of Combined DNA/RNA Molecule: Synthetic oligonucleotide"
  source: /note="DNA/RNA"
  modified_base (1)..(1): bicyclic nucleic acid (BNA)
  modified_base (2)..(2): bicyclic nucleic acid (BNA)
  modified_base (3)..(3): 5-methyl modified nucleotide
  modified_base (7)..(7): 5-methyl modified nucleotide
  modified_base (8)..(8): 5-methyl bicyclic nucleic acid
  modified_base (9)..(9): bicyclic nucleic acid (BNA)
  source: /note="3' tri-ethylene glycol (TEG)"
ttcugucca

SEQ ID NO: 21412 - DNA, 8 bp, Artificial Sequence
  source: /note="Description of Artificial Sequence: Synthetic oligonucleotide"
  source: /note="Description of Combined DNA/RNA Molecule: Synthetic oligonucleotide"
  source: /note="DNA/RNA"
  modified_base (1)..(1): bicyclic nucleic acid (BNA)
  modified_base (2)..(2): bicyclic nucleic acid (BNA)
  modified_base (3)..(3): 5-methyl modified nucleotide
  modified_base (7)..(7): 5-methyl bicyclic nucleic acid
  modified_base (8)..(8): 5-methyl bicyclic nucleic acid
  source: /note="3' tri-ethylene glycol (TEG)"
ttcugucc

SEQ ID NO: 21413 - DNA, 19 bp, Artificial Sequence
  source: /note="Description of Artificial Sequence: Synthetic oligonucleotide"
  source: /note="Description of Combined DNA/RNA Molecule: Synthetic oligonucleotide"
  source: /note="DNA/RNA"
  modified_base (1)..(1): bicyclic nucleic acid (BNA)
  modified_base (2)..(2): 5-methyl bicyclic nucleic acid
  modified_base (6)..(6): 5-methyl modified nucleotide
  modified_base (7)..(7): 5-methyl modified nucleotide
  modified_base (11)..(11): 5-methyl modified nucleotide
  modified_base (12)..(12): 5-methyl modified nucleotide
  modified_base (13)..(13): 5-methyl modified nucleotide
  modified_base (18)..(18): bicyclic nucleic acid (BNA)
  modified_base (19)..(19): bicyclic nucleic acid (BNA)
  source: /note="3' tri-ethylene glycol (TEG)"
tcuguccaagcccgguuga

SEQ ID NO: 21414 - DNA, 18 bp, Artificial Sequence
  source: /note="Description of Artificial Sequence: Synthetic oligonucleotide"
  source: /note="Description of Combined DNA/RNA Molecule: Synthetic oligonucleotide"
  source: /note="DNA/RNA"
  modified_base (1)..(1): bicyclic nucleic acid (BNA)
  modified_base (2)..(2): 5-methyl bicyclic nucleic acid
  modified_base (6)..(6): 5-methyl modified nucleotide
  modified_base (7)..(7): 5-methyl modified nucleotide
  modified_base (11)..(11): 5-methyl modified nucleotide
  modified_base (12)..(12): 5-methyl modified nucleotide
  modified_base (13)..(13): 5-methyl modified nucleotide
  modified_base (17)..(17): bicyclic nucleic acid (BNA)
  modified_base (18)..(18): bicyclic nucleic acid (BNA)
  source: /note="3' tri-ethylene glycol (TEG)"
tcuguccaagcccggutg

SEQ ID NO: 21415 - DNA, 17 bp, Artificial Sequence
  source: /note="Description of Artificial Sequence: Synthetic oligonucleotide"
  source: /note="Description of Combined DNA/RNA Molecule: Synthetic oligonucleotide"
  source: /note="DNA/RNA"
  modified_base (1)..(1): bicyclic nucleic acid (BNA)
  modified_base (2)..(2): 5-methyl bicyclic nucleic acid
  modified_base (6)..(6): 5-methyl modified nucleotide
  modified_base (7)..(7): 5-methyl modified nucleotide
  modified_base (11)..(11): 5-methyl modified nucleotide
  modified_base (12)..(12): 5-methyl modified nucleotide
  modified_base (13)..(13): 5-methyl modified nucleotide
  modified_base (16)..(16): bicyclic nucleic acid (BNA)
  modified_base (17)..(17): bicyclic nucleic acid (BNA)
  source: /note="3' tri-ethylene glycol (TEG)"
tcuguccaagcccggtt

SEQ ID NO: 21416 - DNA, 16 bp, Artificial Sequence
  source: /note="Description of Artificial Sequence: Synthetic oligonucleotide"
  source: /note="Description of Combined DNA/RNA Molecule: Synthetic oligonucleotide"
  source: /note="DNA/RNA"
  modified_base (1)..(1): bicyclic nucleic acid (BNA)
  modified_base (2)..(2): 5-methyl bicyclic nucleic acid
  modified_base (6)..(6): 5-methyl modified nucleotide
  modified_base (7)..(7): 5-methyl modified nucleotide
  modified_base (11)..(11): 5-methyl modified nucleotide
  modified_base (12)..(12): 5-methyl modified nucleotide
  modified_base (13)..(13): 5-methyl modified nucleotide
  modified_base (15)..(15): bicyclic nucleic acid (BNA)
  modified_base (16)..(16): bicyclic nucleic acid (BNA)
  source: /note="3' tri-ethylene glycol (TEG)"
tcuguccaagcccggt

SEQ ID NO: 21417 - DNA, 15 bp, Artificial Sequence
  source: /note="Description of Artificial Sequence: Synthetic oligonucleotide"
  source: /note="Description of Combined DNA/RNA Molecule: Synthetic oligonucleotide"
  source: /note="DNA/RNA"
  modified_base (1)..(1): bicyclic nucleic acid (BNA)
  modified_base (2)..(2): 5-methyl bicyclic nucleic acid
  modified_base (6)..(6): 5-methyl modified nucleotide
  modified_base (7)..(7): 5-methyl modified nucleotide
  modified_base (11)..(11): 5-methyl modified nucleotide
  modified_base (12)..(12): 5-methyl modified nucleotide
  modified_base (13)..(13): 5-methyl modified nucleotide
  modified_base (14)..(14): bicyclic nucleic acid (BNA)
  modified_base (15)..(15): bicyclic nucleic acid (BNA)
  source: /note="3' tri-ethylene glycol (TEG)"
tcuguccaagcccgg

SEQ ID NO: 21418 - DNA, 14 bp, Artificial Sequence
  source: /note="Description of Artificial Sequence: Synthetic oligonucleotide"
  source: /note="Description of Combined DNA/RNA Molecule: Synthetic oligonucleotide"
  source: /note="DNA/RNA"
  modified_base (1)..(1): bicyclic nucleic acid (BNA)
  modified_base (2)..(2): 5-methyl bicyclic nucleic acid
  modified_base (6)..(6): 5-methyl modified nucleotide
  modified_base (7)..(7): 5-methyl modified nucleotide
  modified_base (11)..(11): 5-methyl modified nucleotide
  modified_base (12)..(12): 5-methyl modified nucleotide
  modified_base (13)..(13): 5-methyl bicyclic nucleic acid
  modified_base (14)..(14): bicyclic nucleic acid (BNA)
  source: /note="3' tri-ethylene glycol (TEG)"
tcuguccaagcccg

SEQ ID NO: 21419 - DNA, 13 bp, Artificial Sequence
  source: /note="Description of Artificial Sequence: Synthetic oligonucleotide"
  source: /note="Description of Combined DNA/RNA Molecule: Synthetic oligonucleotide"
  source: /note="DNA/RNA"
  modified_base (1)..(1): bicyclic nucleic acid (BNA)
  modified_base (2)..(2): 5-methyl bicyclic nucleic acid
  modified_base (6)..(6): 5-methyl modified nucleotide
  modified_base (7)..(7): 5-methyl modified nucleotide
  modified_base (11)..(11): 5-methyl modified nucleotide
  modified_base (12)..(12): 5-methyl bicyclic nucleic acid
  modified_base (13)..(13): 5-methyl bicyclic nucleic acid
  source: /note="3' tri-ethylene glycol (TEG)"
tcuguccaagccc

SEQ ID NO: 21420 - DNA, 12 bp, Artificial Sequence
  source: /note="Description of Artificial Sequence: Synthetic oligonucleotide"
  source: /note="Description of Combined DNA/RNA Molecule: Synthetic oligonucleotide"
  source: /note="DNA/RNA"
  modified_base (1)..(1): bicyclic nucleic acid (BNA)
  modified_base (2)..(2): 5-methyl bicyclic nucleic acid
  modified_base (6)..(6): 5-methyl modified nucleotide
  modified_base (7)..(7): 5-methyl modified nucleotide
  modified_base (11)..(11): 5-methyl bicyclic nucleic acid
  modified_base (12)..(12): 5-methyl bicyclic nucleic acid
  source: /note="3' tri-ethylene glycol (TEG)"
tcuguccaagcc

SEQ ID NO: 21421 - DNA, 11 bp, Artificial Sequence
  source: /note="Description of Artificial Sequence: Synthetic oligonucleotide"
  source: /note="Description of Combined DNA/RNA Molecule: Synthetic oligonucleotide"
  source: /note="DNA/RNA"
  modified_base (1)..(1): bicyclic nucleic acid (BNA)
  modified_base (2)..(2): 5-methyl bicyclic nucleic acid
  modified_base (6)..(6): 5-methyl modified nucleotide
  modified_base (7)..(7): 5-methyl modified nucleotide
  modified_base (10)..(10): bicyclic nucleic acid (BNA)
  modified_base (11)..(11): 5-methyl bicyclic nucleic acid
  source: /note="3' tri-ethylene glycol (TEG)"
tcuguccaagc

SEQ ID NO: 21422 - DNA, 10 bp, Artificial Sequence
  source: /note="Description of Artificial Sequence: Synthetic oligonucleotide"
  source: /note="Description of Combined DNA/RNA Molecule: Synthetic oligonucleotide"
  source: /note="DNA/RNA"
  modified_base (1)..(1): bicyclic nucleic acid (BNA)
  modified_base (2)..(2): 5-methyl bicyclic nucleic acid
  modified_base (6)..(6): 5-methyl modified nucleotide
  modified_base (7)..(7): 5-methyl modified nucleotide
  modified_base (9)..(9): bicyclic nucleic acid (BNA)
  modified_base (10)..(10): bicyclic nucleic acid (BNA)
  source: /note="3' tri-ethylene glycol (TEG)"
tcuguccaag

SEQ ID NO: 21423 - DNA, 9 bp, Artificial Sequence
  source: /note="Description of Artificial Sequence: Synthetic oligonucleotide"
  source: /note="Description of Combined DNA/RNA Molecule: Synthetic oligonucleotide"
  source: /note="DNA/RNA"
  modified_base (1)..(1): bicyclic nucleic acid (BNA)
  modified_base (2)..(2): 5-methyl bicyclic nucleic acid
  modified_base (6)..(6): 5-methyl modified nucleotide
  modified_base (7)..(7): 5-methyl modified nucleotide
  modified_base (8)..(8): bicyclic nucleic acid (BNA)
  modified_base (9)..(9): bicyclic nucleic acid (BNA)
  source: /note="3' tri-ethylene glycol (TEG)"
tcuguccaa

SEQ ID NO: 21424 - DNA, 8 bp, Artificial Sequence
  source: /note="Description of Artificial Sequence: Synthetic oligonucleotide"
  source: /note="Description of Combined DNA/RNA Molecule: Synthetic oligonucleotide"
  source: /note="DNA/RNA"
  modified_base (1)..(1): bicyclic nucleic acid (BNA)
  modified_base (2)..(2): 5-methyl bicyclic nucleic acid
  modified_base (6)..(6): 5-methyl modified nucleotide
  modified_base (7)..(7): 5-methyl bicyclic nucleic acid
  modified_base (8)..(8): bicyclic nucleic acid (BNA)
  source: /note="3' tri-ethylene glycol (TEG)"
tcugucca

SEQ ID NO: 21425 - DNA, 17 bp, Artificial Sequence
  source: /note="Description of Artificial Sequence: Synthetic oligonucleotide"
  source: /note="Description of Combined DNA/RNA Molecule: Synthetic oligonucleotide"
  source: /note="DNA/RNA"
  modified_base (1)..(1): 5-methyl bicyclic nucleic acid
  modified_base (2)..(2): bicyclic nucleic acid (BNA)
  modified_base (5)..(5): 5-methyl modified nucleotide
  modified_base (6)..(6): 5-methyl modified nucleotide
  modified_base (10)..(10): 5-methyl modified nucleotide
  modified_base (11)..(11): 5-methyl modified nucleotide
  modified_base (12)..(12): 5-methyl modified nucleotide
  modified_base (16)..(16): bicyclic nucleic acid (BNA)
  modified_base (17)..(17): bicyclic nucleic acid (BNA)
  source: /note="3' tri-ethylene glycol (TEG)"
ctguccaagcccggutg

SEQ ID NO: 21426 - DNA, 16 bp, Artificial Sequence
  source: /note="Description of Artificial Sequence: Synthetic oligonucleotide"
  source: /note="Description of Combined DNA/RNA Molecule: Synthetic oligonucleotide"
  source: /note="DNA/RNA"
  modified_base (1)..(1): 5-methyl bicyclic nucleic acid
  modified_base (2)..(2): bicyclic nucleic acid (BNA)
  modified_base (5)..(5): 5-methyl modified nucleotide
  modified_base (6)..(6): 5-methyl modified nucleotide
  modified_base (10)..(10): 5-methyl modified nucleotide
  modified_base (11)..(11): 5-methyl modified nucleotide
  modified_base (12)..(12): 5-methyl modified nucleotide
  modified_base (15)..(15): bicyclic nucleic acid (BNA)
  modified_base (16)..(16): bicyclic nucleic acid (BNA)
  source: /note="3' tri-ethylene glycol (TEG)"
ctguccaagcccggtt

SEQ ID NO: 21427 - DNA, 15 bp, Artificial Sequence
  source: /note="Description of Artificial Sequence: Synthetic oligonucleotide"
  source: /note="Description of Combined DNA/RNA Molecule: Synthetic oligonucleotide"
  source: /note="DNA/RNA"
  modified_base (1)..(1): 5-methyl bicyclic nucleic acid
  modified_base (2)..(2): bicyclic nucleic acid (BNA)
  modified_base (5)..(5): 5-methyl modified nucleotide
  modified_base (6)..(6): 5-methyl modified nucleotide
  modified_base (10)..(10): 5-methyl modified nucleotide
  modified_base (11)..(11): 5-methyl modified nucleotide
  modified_base (12)..(12): 5-methyl modified nucleotide
  modified_base (14)..(14): bicyclic nucleic acid (BNA)
  modified_base (15)..(15): bicyclic nucleic acid (BNA)
  source: /note="3' tri-ethylene glycol (TEG)"
ctguccaagcccggt

SEQ ID NO: 21428 - DNA, 14 bp, Artificial Sequence
  source: /note="Description of Artificial Sequence: Synthetic oligonucleotide"
  source: /note="Description of Combined DNA/RNA Molecule: Synthetic oligonucleotide"
  source: /note="DNA/RNA"
  modified_base (1)..(1): 5-methyl bicyclic nucleic acid
  modified_base (2)..(2): bicyclic nucleic acid (BNA)
  modified_base (5)..(5): 5-methyl modified nucleotide
  modified_base (6)..(6): 5-methyl modified nucleotide
  modified_base (10)..(10): 5-methyl modified nucleotide
  modified_base (11)..(11): 5-methyl modified nucleotide
  modified_base (12)..(12): 5-methyl modified nucleotide
  modified_base (13)..(13): bicyclic nucleic acid (BNA)
  modified_base (14)..(14): bicyclic nucleic acid (BNA)
  source: /note="3' tri-ethylene glycol (TEG)"
ctguccaagcccgg

SEQ ID NO: 21429 - DNA, 13 bp, Artificial Sequence
  source: /note="Description of Artificial Sequence: Synthetic oligonucleotide"
  source: /note="Description of Combined DNA/RNA Molecule: Synthetic oligonucleotide"
  source: /note="DNA/RNA"
  modified_base (1)..(1): 5-methyl bicyclic nucleic acid
  modified_base (2)..(2): bicyclic nucleic acid (BNA)
  modified_base (5)..(5): 5-methyl modified nucleotide
  modified_base (6)..(6): 5-methyl modified nucleotide
  modified_base (10)..(10): 5-methyl modified nucleotide
  modified_base (11)..(11): 5-methyl modified nucleotide
  modified_base (12)..(12): 5-methyl bicyclic nucleic acid
  modified_base (13)..(13): bicyclic nucleic acid (BNA)
  source: /note="3' tri-ethylene glycol (TEG)"
ctguccaagcccg

SEQ ID NO: 21430 - DNA, 12 bp, Artificial Sequence
  source: /note="Description of Artificial Sequence: Synthetic oligonucleotide"
  source: /note="Description of Combined DNA/RNA Molecule: Synthetic oligonucleotide"
  source: /note="DNA/RNA"
  modified_base (1)..(1): 5-methyl bicyclic nucleic acid
  modified_base (2)..(2): bicyclic nucleic acid (BNA)
  modified_base (5)..(5): 5-methyl modified nucleotide
  modified_base (6)..(6): 5-methyl modified nucleotide
  modified_base (10)..(10): 5-methyl modified nucleotide
  modified_base (11)..(11): 5-methyl bicyclic nucleic acid
  modified_base (12)..(12): 5-methyl bicyclic nucleic acid
  source: /note="3' tri-ethylene glycol (TEG)"
ctguccaagccc

SEQ ID NO: 21431 - DNA, 11 bp, Artificial Sequence
  source: /note="Description of Artificial Sequence: Synthetic oligonucleotide"
  source: /note="Description of Combined DNA/RNA Molecule: Synthetic oligonucleotide"
  source: /note="DNA/RNA"
  modified_base (1)..(1): 5-methyl bicyclic nucleic acid
  modified_base (2)..(2): bicyclic nucleic acid (BNA)
  modified_base (5)..(5): 5-methyl modified nucleotide
  modified_base (6)..(6): 5-methyl modified nucleotide
  modified_base (10)..(10): 5-methyl bicyclic nucleic acid
  modified_base (11)..(11): 5-methyl bicyclic nucleic acid
  source: /note="3' tri-ethylene glycol (TEG)"
ctguccaagcc

SEQ ID NO: 21432 - DNA, 10 bp, Artificial Sequence
  source: /note="Description of Artificial Sequence: Synthetic oligonucleotide"
  source: /note="Description of Combined DNA/RNA Molecule: Synthetic oligonucleotide"
  source: /note="DNA/RNA"
  modified_base (1)..(1): 5-methyl bicyclic nucleic acid
  modified_base (2)..(2): bicyclic nucleic acid (BNA)
  modified_base (5)..(5): 5-methyl modified nucleotide
  modified_base (6)..(6): 5-methyl modified nucleotide
  modified_base (9)..(9): bicyclic nucleic acid (BNA)
  modified_base (10)..(10): 5-methyl bicyclic nucleic acid
  source: /note="3' tri-ethylene glycol (TEG)"
ctguccaagc

SEQ ID NO: 21433 - DNA, 9 bp, Artificial Sequence
  source: /note="Description of Artificial Sequence: Synthetic oligonucleotide"
  source: /note="Description of Combined DNA/RNA Molecule: Synthetic oligonucleotide"
  source: /note="DNA/RNA"
  modified_base (1)..(1): 5-methyl bicyclic nucleic acid
  modified_base (2)..(2): bicyclic nucleic acid (BNA)
  modified_base (5)..(5): 5-methyl modified nucleotide
  modified_base (6)..(6): 5-methyl modified nucleotide
  modified_base (8)..(8): bicyclic nucleic acid (BNA)
  modified_base (9)..(9): bicyclic nucleic acid (BNA)
  source: /note="3' tri-ethylene glycol (TEG)"
ctguccaag

SEQ ID NO: 21434 - DNA, 8 bp, Artificial Sequence
  source: /note="Description of Artificial Sequence: Synthetic oligonucleotide"
  source: /note="Description of Combined DNA/RNA Molecule: Synthetic oligonucleotide"
  source: /note="DNA/RNA"
  modified_base (1)..(1): 5-methyl bicyclic nucleic acid
  modified_base (2)..(2): bicyclic nucleic acid (BNA)
  modified_base (5)..(5): 5-methyl modified nucleotide
  modified_base (6)..(6): 5-methyl modified nucleotide
  modified_base (7)..(7): bicyclic nucleic acid (BNA)
  modified_base (8)..(8): bicyclic nucleic acid (BNA)
  source: /note="3' tri-ethylene glycol (TEG)"
ctguccaa

SEQ ID NO: 21435 - DNA, 20 bp, Artificial Sequence
  source: /note="Description of Artificial Sequence: Synthetic oligonucleotide"
  source: /note="Description of Combined DNA/RNA Molecule: Synthetic oligonucleotide"
  source: /note="DNA/RNA"
  modified_base (1)..(1): bicyclic nucleic acid (BNA)
  modified_base (2)..(2): bicyclic nucleic acid (BNA)
  modified_base (4)..(4): 5-methyl modified nucleotide
  modified_base (8)..(8): 5-methyl modified nucleotide
  modified_base (9)..(9): 5-methyl modified nucleotide
  modified_base (13)..(13): 5-methyl modified nucleotide
  modified_base (14)..(14): 5-methyl modified nucleotide
  modified_base (15)..(15): 5-methyl modified nucleotide
  modified_base (19)..(19): bicyclic nucleic acid (BNA)
  modified_base (20)..(20): bicyclic nucleic acid (BNA)
  source: /note="3' tri-ethylene glycol (TEG)"
gtucuguccaagcccggutg

SEQ ID NO: 21436 - DNA, 19 bp, Artificial Sequence
  source: /note="Description of Artificial Sequence: Synthetic oligonucleotide"
  source: /note="Description of Combined DNA/RNA Molecule: Synthetic oligonucleotide"
  source: /note="DNA/RNA"
  modified_base (1)..(1): bicyclic nucleic acid (BNA)
  modified_base (2)..(2): bicyclic nucleic acid (BNA)
  modified_base (4)..(4): 5-methyl modified nucleotide
  modified_base (8)..(8): 5-methyl modified nucleotide
  modified_base (9)..(9): 5-methyl modified nucleotide
  modified_base (13)..(13): 5-methyl modified nucleotide
  modified_base (14)..(14): 5-methyl modified nucleotide
  modified_base (15)..(15): 5-methyl modified nucleotide
  modified_base (18)..(18): bicyclic nucleic acid (BNA)
  modified_base (19)..(19): bicyclic nucleic acid (BNA)
  source: /note="3' tri-ethylene glycol (TEG)"
gtucuguccaagcccggtt

SEQ ID NO: 21437 - DNA, 18 bp, Artificial Sequence
  source: /note="Description of Artificial Sequence: Synthetic oligonucleotide"
  source: /note="Description of Combined DNA/RNA Molecule: Synthetic oligonucleotide"
  source: /note="DNA/RNA"
  modified_base (1)..(1): bicyclic nucleic acid (BNA)
  modified_base (2)..(2): bicyclic nucleic acid (BNA)
  modified_base (4)..(4): 5-methyl modified nucleotide
  modified_base (8)..(8): 5-methyl modified nucleotide
  modified_base (9)..(9): 5-methyl modified nucleotide
  modified_base (13)..(13): 5-methyl modified nucleotide
  modified_base (14)..(14): 5-methyl modified nucleotide
  modified_base (15)..(15): 5-methyl modified nucleotide
  modified_base (17)..(17): bicyclic nucleic acid (BNA)
  modified_base (18)..(18): bicyclic nucleic acid (BNA)
  source: /note="3' tri-ethylene glycol (TEG)"
gtucuguccaagcccggt

SEQ ID NO: 21438 - DNA, 17 bp, Artificial Sequence
  source: /note="Description of Artificial Sequence: Synthetic oligonucleotide"
  source: /note="Description of Combined DNA/RNA Molecule: Synthetic oligonucleotide"
  source: /note="DNA/RNA"
  modified_base (1)..(1): bicyclic nucleic acid (BNA)
  modified_base (2)..(2): bicyclic nucleic acid (BNA)
  modified_base (4)..(4): 5-methyl modified nucleotide
  modified_base (8)..(8): 5-methyl modified nucleotide
  modified_base (9)..(9): 5-methyl modified nucleotide
  modified_base (13)..(13): 5-methyl modified nucleotide
  modified_base (14)..(14): 5-methyl modified nucleotide
  modified_base (15)..(15): 5-methyl modified nucleotide
  modified_base (16)..(16): bicyclic nucleic acid (BNA)
  modified_base (17)..(17): bicyclic nucleic acid (BNA)
  source: /note="3' tri-ethylene glycol (TEG)"
gtucuguccaagcccgg

SEQ ID NO: 21439 - DNA, 16 bp, Artificial Sequence
  source: /note="Description of Artificial Sequence: Synthetic oligonucleotide"
  source: /note="Description of Combined DNA/RNA Molecule: Synthetic oligonucleotide"
  source: /note="DNA/RNA"
  modified_base (1)..(1): bicyclic nucleic acid (BNA)
  modified_base (2)..(2): bicyclic nucleic acid (BNA)
  modified_base (4)..(4): 5-methyl modified nucleotide
  modified_base (8)..(8): 5-methyl modified nucleotide
  modified_base (9)..(9): 5-methyl modified nucleotide
  modified_base (13)..(13): 5-methyl modified nucleotide
  modified_base (14)..(14): 5-methyl modified nucleotide
  modified_base (15)..(15): 5-methyl bicyclic nucleic acid
  modified_base (16)..(16): bicyclic nucleic acid (BNA)
  source: /note="3' tri-ethylene glycol (TEG)"
gtucuguccaagcccg

SEQ ID NO: 21440 - DNA, 15 bp, Artificial Sequence
  source: /note="Description of Artificial Sequence: Synthetic oligonucleotide"
  source: /note="Description of Combined DNA/RNA Molecule: Synthetic oligonucleotide"
  source: /note="DNA/RNA"
  modified_base (1)..(1): bicyclic nucleic acid (BNA)
  modified_base (2)..(2): bicyclic nucleic acid (BNA)
  modified_base (4)..(4): 5-methyl modified nucleotide
  modified_base (8)..(8): 5-methyl modified nucleotide
  modified_base (9)..(9): 5-methyl modified nucleotide
  modified_base (13)..(13): 5-methyl modified nucleotide
  modified_base (14)..(14): 5-methyl bicyclic nucleic acid
  modified_base (15)..(15): 5-methyl bicyclic nucleic acid
  source: /note="3' tri-ethylene glycol (TEG)"
gtucuguccaagccc

SEQ ID NO: 21441 - DNA, 14 bp, Artificial Sequence
  source: /note="Description of Artificial Sequence: Synthetic oligonucleotide"
  source: /note="Description of Combined DNA/RNA Molecule: Synthetic oligonucleotide"
  source: /note="DNA/RNA"
  modified_base (1)..(1): bicyclic nucleic acid (BNA)
  modified_base (2)..(2): bicyclic nucleic acid (BNA)
  modified_base (4)..(4): 5-methyl modified nucleotide
  modified_base (8)..(8): 5-methyl modified nucleotide
  modified_base (9)..(9): 5-methyl modified nucleotide
  modified_base (13)..(13): 5-methyl bicyclic nucleic acid
  modified_base (14)..(14): 5-methyl bicyclic nucleic acid
  source: /note="3' tri-ethylene glycol (TEG)"
gtucuguccaagcc

SEQ ID NO: 21442 - DNA, 13 bp, Artificial Sequence
  source: /note="Description of Artificial Sequence: Synthetic oligonucleotide"
  source: /note="Description of Combined DNA/RNA Molecule: Synthetic oligonucleotide"
  source: /note="DNA/RNA"
  modified_base (1)..(1): bicyclic nucleic acid (BNA)
  modified_base (2)..(2): bicyclic nucleic acid (BNA)
  modified_base (4)..(4): 5-methyl modified nucleotide
  modified_base (8)..(8): 5-methyl modified nucleotide
  modified_base (9)..(9): 5-methyl modified nucleotide
  modified_base (12)..(12): bicyclic nucleic acid (BNA)
  modified_base (13)..(13): 5-methyl bicyclic nucleic acid
  source: /note="3' tri-ethylene glycol (TEG)"
gtucuguccaagc

SEQ ID NO: 21443 - DNA, 12 bp, Artificial Sequence
  source: /note="Description of Artificial Sequence: Synthetic oligonucleotide"
  source: /note="Description of Combined DNA/RNA Molecule: Synthetic oligonucleotide"
  source: /note="DNA/RNA"
  modified_base (1)..(1): bicyclic nucleic acid (BNA)
  modified_base (2)..(2): bicyclic nucleic acid (BNA)
  modified_base (4)..(4): 5-methyl modified nucleotide
  modified_base (8)..(8): 5-methyl modified nucleotide
  modified_base (9)..(9): 5-methyl modified nucleotide
  modified_base (11)..(11): bicyclic nucleic acid (BNA)
  modified_base (12)..(12): bicyclic nucleic acid (BNA)
  source: /note="3' tri-ethylene glycol (TEG)"
gtucuguccaag

SEQ ID NO: 21444 - DNA, 11 bp, Artificial Sequence
  source: /note="Description of Artificial Sequence: Synthetic oligonucleotide"
  source: /note="Description of Combined DNA/RNA Molecule: Synthetic oligonucleotide"
  source: /note="DNA/RNA"
  modified_base (1)..(1): bicyclic nucleic acid (BNA)
  modified_base (2)..(2): bicyclic nucleic acid (BNA)
  modified_base (4)..(4): 5-methyl modified nucleotide
  modified_base (8)..(8): 5-methyl modified nucleotide
  modified_base (9)..(9): 5-methyl modified nucleotide
  modified_base (10)..(10): bicyclic nucleic acid (BNA)
  modified_base (11)..(11): bicyclic nucleic acid (BNA)
  source: /note="3' tri-ethylene glycol (TEG)"
gtucuguccaa

SEQ ID NO: 21445 - DNA, 10 bp, Artificial Sequence
  source: /note="Description of Artificial Sequence: Synthetic oligonucleotide"
  source: /note="Description of Combined DNA/RNA Molecule: Synthetic oligonucleotide"
  source: /note="DNA/RNA"
  modified_base (1)..(1): bicyclic nucleic acid (BNA)
  modified_base (2)..(2): bicyclic nucleic acid (BNA)
  modified_base (4)..(4): 5-methyl modified nucleotide
  modified_base (8)..(8): 5-methyl modified nucleotide
  modified_base (9)..(9): 5-methyl bicyclic nucleic acid
  modified_base (10)..(10): bicyclic nucleic acid (BNA)
  source: /note="3' tri-ethylene glycol (TEG)"
gtucugucca

SEQ ID NO: 21446 - DNA, 9 bp, Artificial Sequence
  source: /note="Description of Artificial Sequence: Synthetic oligonucleotide"
  source: /note="Description of Combined DNA/RNA Molecule: Synthetic oligonucleotide"
  source: /note="DNA/RNA"
  modified_base (1)..(1): bicyclic nucleic acid (BNA)
  modified_base (2)..(2): bicyclic nucleic acid (BNA)
  modified_base (4)..(4): 5-methyl modified nucleotide
  modified_base (8)..(8): 5-methyl bicyclic nucleic acid
  modified_base (9)..(9): 5-methyl bicyclic nucleic acid
  source: /note="3' tri-ethylene glycol (TEG)"
gtucugucc

SEQ ID NO: 21447 - DNA, 8 bp, Artificial Sequence
  source: /note="Description of Artificial Sequence: Synthetic oligonucleotide"
  source: /note="Description of Combined DNA/RNA Molecule: Synthetic oligonucleotide"
  source: /note="DNA/RNA"
  modified_base (1)..(1): bicyclic nucleic acid (BNA)
  modified_base (2)..(2): bicyclic nucleic acid (BNA)
  modified_base (4)..(4): 5-methyl modified nucleotide
  modified_base (7)..(7): bicyclic nucleic acid (BNA)
  modified_base (8)..(8): 5-methyl bicyclic nucleic acid
  source: /note="3' tri-ethylene glycol (TEG)"
gtucugtc

SEQ ID NO: 21448 - DNA, 20 bp, Artificial Sequence
  source: /note="Description of Artificial Sequence: Synthetic oligonucleotide"
  source: /note="Description of Combined DNA/RNA Molecule: Synthetic oligonucleotide"
  source: /note="DNA/RNA"
  modified_base (1)..(1): bicyclic nucleic acid (BNA)
  modified_base (2)..(2): bicyclic nucleic acid (BNA)
  modified_base (5)..(5): 5-methyl modified nucleotide
  modified_base (9)..(9): 5-methyl modified nucleotide
  modified_base (10)..(10): 5-methyl modified nucleotide
  modified_base (14)..(14): 5-methyl modified nucleotide
  modified_base (15)..(15): 5-methyl modified nucleotide
  modified_base (16)..(16): 5-methyl modified nucleotide
  modified_base (19)..(19): bicyclic nucleic acid (BNA)
  modified_base (20)..(20): bicyclic nucleic acid (BNA)
  source: /note="3' tri-ethylene glycol (TEG)"
aguucuguccaagcccggtt

SEQ ID NO: 21449 - DNA, 19 bp, Artificial Sequence
  source: /note="Description of Artificial Sequence: Synthetic oligonucleotide"
  source: /note="Description of Combined DNA/RNA Molecule: Synthetic oligonucleotide"
  source: /note="DNA/RNA"
  modified_base (1)..(1): bicyclic nucleic acid (BNA)
  modified_base (2)..(2): bicyclic nucleic acid (BNA)
  modified_base (5)..(5): 5-methyl modified nucleotide
  modified_base (9)..(9): 5-methyl modified nucleotide
  modified_base (10)..(10): 5-methyl modified nucleotide
  modified_base (14)..(14): 5-methyl modified nucleotide
  modified_base (15)..(15): 5-methyl modified nucleotide
  modified_base (16)..(16): 5-methyl modified nucleotide
  modified_base (18)..(18): bicyclic nucleic acid (BNA)
  modified_base (19)..(19): bicyclic nucleic acid (BNA)
  source: /note="3' tri-ethylene glycol (TEG)"
aguucuguccaagcccggt

SEQ ID NO: 21450 - RNA, 18 nt, Artificial Sequence
  source: /note="Description of Artificial Sequence: Synthetic oligonucleotide"
  source: /note="RNA"
  modified_base (1)..(1): bicyclic nucleic acid (BNA)
  modified_base (2)..(2): bicyclic nucleic acid (BNA)
  modified_base (5)..(5): 5-methyl modified nucleotide
  modified_base (9)..(9): 5-methyl modified nucleotide
  modified_base (10)..(10): 5-methyl modified nucleotide
  modified_base (14)..(14): 5-methyl modified nucleotide
  modified_base (15)..(15): 5-methyl modified nucleotide
  modified_base (16)..(16): 5-methyl modified nucleotide
  modified_base (17)..(17): bicyclic nucleic acid (BNA)
  modified_base (18)..(18): bicyclic nucleic acid (BNA)
  source: /note="3' tri-ethylene glycol (TEG)"
aguucuguccaagcccgg

SEQ ID NO: 21451 - RNA, 17 nt, Artificial Sequence
  source: /note="Description of Artificial Sequence: Synthetic oligonucleotide"
  source: /note="RNA"
  modified_base (1)..(1): bicyclic nucleic acid (BNA)
  modified_base (2)..(2): bicyclic nucleic acid (BNA)
  modified_base (5)..(5): 5-methyl modified nucleotide
  modified_base (9)..(9): 5-methyl modified nucleotide
  modified_base (10)..(10): 5-methyl modified nucleotide
  modified_base (14)..(14): 5-methyl modified nucleotide
  modified_base (15)..(15): 5-methyl modified nucleotide
  modified_base (16)..(16): 5-methyl bicyclic nucleic acid
  modified_base (17)..(17): bicyclic nucleic acid (BNA)
  source: /note="3' tri-ethylene glycol (TEG)"
aguucuguccaagcccg

SEQ ID NO: 21452 - RNA, 16 nt, Artificial Sequence
  source: /note="Description of Artificial Sequence: Synthetic oligonucleotide"
  source: /note="RNA"
  modified_base (1)..(1): bicyclic nucleic acid (BNA)
  modified_base (2)..(2): bicyclic nucleic acid (BNA)
  modified_base (5)..(5): 5-methyl modified nucleotide
  modified_base (9)..(9): 5-methyl modified nucleotide
  modified_base (10)..(10): 5-methyl modified nucleotide
  modified_base (14)..(14): 5-methyl modified nucleotide
  modified_base (15)..(15): 5-methyl bicyclic nucleic acid
  modified_base (16)..(16): 5-methyl bicyclic nucleic acid
  source: /note="3' tri-ethylene glycol (TEG)"
aguucuguccaagccc

SEQ ID NO: 21453 - RNA, 15 nt, Artificial Sequence
  source: /note="Description of Artificial Sequence: Synthetic oligonucleotide"
  source: /note="RNA"
  modified_base (1)..(1): bicyclic nucleic acid (BNA)
  modified_base (2)..(2): bicyclic nucleic acid (BNA)
  modified_base (5)..(5): 5-methyl modified nucleotide
  modified_base (9)..(9): 5-methyl modified nucleotide
  modified_base (10)..(10): 5-methyl modified nucleotide
  modified_base (14)..(14): 5-methyl bicyclic nucleic acid
  modified_base (15)..(15): 5-methyl bicyclic nucleic acid
  source: /note="3' tri-ethylene glycol (TEG)"
aguucuguccaagcc

SEQ ID NO: 21454 - RNA, 14 nt, Artificial Sequence
  source: /note="Description of Artificial Sequence: Synthetic oligonucleotide"
  source: /note="RNA"
  modified_base (1)..(1): bicyclic nucleic acid (BNA)
  modified_base (2)..(2): bicyclic nucleic acid (BNA)
  modified_base (5)..(5): 5-methyl modified nucleotide
  modified_base (9)..(9): 5-methyl modified nucleotide
  modified_base (10)..(10): 5-methyl modified nucleotide
  modified_base (13)..(13): bicyclic nucleic acid (BNA)
  modified_base (14)..(14): 5-methyl bicyclic nucleic acid
  source: /note="3' tri-ethylene glycol (TEG)"
aguucuguccaagc

SEQ ID NO: 21455 - RNA, 13 nt, Artificial Sequence
  source: /note="Description of Artificial Sequence: Synthetic oligonucleotide"
  source: /note="RNA"
  modified_base (1)..(1): bicyclic nucleic acid (BNA)
  modified_base (2)..(2): bicyclic nucleic acid (BNA)
  modified_base (5)..(5): 5-methyl modified nucleotide
  modified_base (9)..(9): 5-methyl modified nucleotide
  modified_base (10)..(10): 5-methyl modified nucleotide
  modified_base (12)..(12): bicyclic nucleic acid (BNA)
  modified_base (13)..(13): bicyclic nucleic acid (BNA)
  source: /note="3' tri-ethylene glycol (TEG)"
aguucuguccaag

SEQ ID NO: 21456 - RNA, 12 nt, Artificial Sequence
  source: /note="Description of Artificial Sequence: Synthetic oligonucleotide"
  source: /note="RNA"
  modified_base (1)..(1): bicyclic nucleic acid (BNA)
  modified_base (2)..(2): bicyclic nucleic acid (BNA)
  modified_base (5)..(5): 5-methyl modified nucleotide
  modified_base (9)..(9): 5-methyl modified nucleotide
  modified_base (10)..(10): 5-methyl modified nucleotide
  modified_base (11)..(11): bicyclic nucleic acid (BNA)
  modified_base (12)..(12): bicyclic nucleic acid (BNA)
  source: /note="3' tri-ethylene glycol (TEG)"
aguucuguccaa

SEQ ID NO: 21457 - RNA, 11 nt, Artificial Sequence
  source: /note="Description of Artificial Sequence: Synthetic oligonucleotide"
  source: /note="RNA"
  modified_base (1)..(1): bicyclic nucleic acid (BNA)
  modified_base (2)..(2): bicyclic nucleic acid (BNA)
  modified_base (5)..(5): 5-methyl modified nucleotide
  modified_base (9)..(9): 5-methyl modified nucleotide
  modified_base (10)..(10): 5-methyl bicyclic nucleic acid
  modified_base (11)..(11): bicyclic nucleic acid (BNA)
  source: /note="3' tri-ethylene glycol (TEG)"
aguucugucca

SEQ ID NO: 21458 - RNA, 10 nt, Artificial Sequence
  source: /note="Description of Artificial Sequence: Synthetic oligonucleotide"
  source: /note="RNA"
  modified_base (1)..(1): bicyclic nucleic acid (BNA)
  modified_base (2)..(2): bicyclic nucleic acid (BNA)
  modified_base (5)..(5): 5-methyl modified nucleotide
  modified_base (9)..(9): 5-methyl bicyclic nucleic acid
  modified_base (10)..(10): 5-methyl bicyclic nucleic acid
  source: /note="3' tri-ethylene glycol (TEG)"
aguucugucc

SEQ ID NO: 21459 - DNA, 9 bp, Artificial Sequence
  source: /note="Description of Artificial Sequence: Synthetic oligonucleotide"
  source: /note="Description of Combined DNA/RNA Molecule: Synthetic oligonucleotide"
  source: /note="DNA/RNA"
  modified_base (1)..(1): bicyclic nucleic acid (BNA)
  modified_base (2)..(2): bicyclic nucleic acid (BNA)
  modified_base (5)..(5): 5-methyl modified nucleotide
  modified_base (8)..(8): bicyclic nucleic acid (BNA)
  modified_base (9)..(9): 5-methyl bicyclic nucleic acid
  source: /note="3' tri-ethylene glycol (TEG)"
aguucugtc

SEQ ID NO: 21460 - DNA, 8 bp, Artificial Sequence
  source: /note="Description of Artificial Sequence: Synthetic oligonucleotide"
  source: /note="Description of Combined DNA/RNA Molecule: Synthetic oligonucleotide"
  source: /note="DNA/RNA"
  modified_base (1)..(1): bicyclic nucleic acid (BNA)
  modified_base (2)..(2): bicyclic nucleic acid (BNA)
  modified_base (5)..(5): 5-methyl modified nucleotide
  modified_base (7)..(7): bicyclic nucleic acid (BNA)
  modified_base (8)..(8): bicyclic nucleic acid (BNA)
  source: /note="3' tri-ethylene glycol (TEG)"
aguucugt

SEQ ID NO: 21461 - DNA, 20 bp, Artificial Sequence
  source: /note="Description of Artificial Sequence: Synthetic oligonucleotide"
  source: /note="Description of Combined DNA/RNA Molecule: Synthetic oligonucleotide"
  source: /note="DNA/RNA"
  modified_base (1)..(1): bicyclic nucleic acid (BNA)
  modified_base (2)..(2): bicyclic nucleic acid (BNA)
  modified_base (6)..(6): 5-methyl modified nucleotide
  modified_base (10)..(10): 5-methyl modified nucleotide
  modified_base (11)..(11): 5-methyl modified nucleotide
  modified_base (15)..(15): 5-methyl modified nucleotide
  modified_base (16)..(16): 5-methyl modified nucleotide
  modified_base (17)..(17): 5-methyl modified nucleotide
  modified_base (19)..(19): bicyclic nucleic acid (BNA)
  modified_base (20)..(20): bicyclic nucleic acid (BNA)
  source: /note="3' tri-ethylene glycol (TEG)"
aaguucuguccaagcccggt

SEQ ID NO: 21462 - RNA, 19 nt, Artificial Sequence
  source: /note="Description of Artificial Sequence: Synthetic oligonucleotide"
  source: /note="RNA"
  modified_base (1)..(1): bicyclic nucleic acid (BNA)
  modified_base (2)..(2): bicyclic nucleic acid (BNA)
  modified_base (6)..(6): 5-methyl modified nucleotide
  modified_base (10)..(10): 5-methyl modified nucleotide
  modified_base (11)..(11): 5-methyl modified nucleotide
  modified_base (15)..(15): 5-methyl modified nucleotide
  modified_base (16)..(16): 5-methyl modified nucleotide
  modified_base (17)..(17): 5-methyl modified nucleotide
  modified_base (18)..(18): bicyclic nucleic acid (BNA)
  modified_base (19)..(19): bicyclic nucleic acid (BNA)
  source: /note="3' tri-ethylene glycol (TEG)"
aaguucuguccaagcccgg

SEQ ID NO: 21463 - RNA, 18 nt, Artificial Sequence
  source: /note="Description of Artificial Sequence: Synthetic oligonucleotide"
  source: /note="RNA"
  modified_base (1)..(1): bicyclic nucleic acid (BNA)
  modified_base (2)..(2): bicyclic nucleic acid (BNA)
  modified_base (6)..(6): 5-methyl modified nucleotide
  modified_base (10)..(10): 5-methyl modified nucleotide
  modified_base (11)..(11): 5-methyl modified nucleotide
  modified_base (15)..(15): 5-methyl modified nucleotide
  modified_base (16)..(16): 5-methyl modified nucleotide
  modified_base (17)..(17): 5-methyl bicyclic nucleic acid
  modified_base (18)..(18): bicyclic nucleic acid (BNA)
  source: /note="3' tri-ethylene glycol (TEG)"
aaguucuguccaagcccg

SEQ ID NO: 21464 - RNA, 17 nt, Artificial Sequence
  source: /note="Description of Artificial Sequence: Synthetic oligonucleotide"
  source: /note="RNA"
  modified_base (1)..(1): bicyclic nucleic acid (BNA)
  modified_base (2)..(2): bicyclic nucleic acid (BNA)
  modified_base (6)..(6): 5-methyl modified nucleotide
  modified_base (10)..(10): 5-methyl modified nucleotide
  modified_base (11)..(11): 5-methyl modified nucleotide
  modified_base (15)..(15): 5-methyl modified nucleotide
  modified_base (16)..(16): 5-methyl bicyclic nucleic acid
  modified_base (17)..(17): 5-methyl bicyclic nucleic acid
  source: /note="3' tri-ethylene glycol (TEG)"
aaguucuguccaagccc

SEQ ID NO: 21465 - RNA, 16 nt, Artificial Sequence
  source: /note="Description of Artificial Sequence: Synthetic oligonucleotide"
  source: /note="RNA"
  modified_base (1)..(1): bicyclic nucleic acid (BNA)
  modified_base (2)..(2): bicyclic nucleic acid (BNA)
  modified_base (6)..(6): 5-methyl modified nucleotide
  modified_base (10)..(10): 5-methyl modified nucleotide
  modified_base (11)..(11): 5-methyl modified nucleotide
  modified_base (15)..(15): 5-methyl bicyclic nucleic acid
  modified_base (16)..(16): 5-methyl bicyclic nucleic acid
  source: /note="3' tri-ethylene glycol (TEG)"
aaguucuguccaagcc

SEQ ID NO: 21466 - RNA, 15 nt, Artificial Sequence
  source: /note="Description of Artificial Sequence: Synthetic oligonucleotide"
  source: /note="RNA"
  modified_base (1)..(1): bicyclic nucleic acid (BNA)
  modified_base (2)..(2): bicyclic nucleic acid (BNA)
  modified_base (6)..(6): 5-methyl modified nucleotide
  modified_base (10)..(10): 5-methyl modified nucleotide
  modified_base (11)..(11): 5-methyl modified nucleotide
  modified_base (14)..(14): bicyclic nucleic acid (BNA)
  modified_base (15)..(15): 5-methyl bicyclic nucleic acid
  source: /note="3' tri-ethylene glycol (TEG)"
aaguucuguccaagc

SEQ ID NO: 21467 - RNA, 14 nt, Artificial Sequence
  source: /note="Description of Artificial Sequence: Synthetic oligonucleotide"
  source: /note="RNA"
  modified_base (1)..(1): bicyclic nucleic acid (BNA)
  modified_base (2)..(2): bicyclic nucleic acid (BNA)
  modified_base (6)..(6): 5-methyl modified nucleotide
  modified_base (10)..(10): 5-methyl modified nucleotide
  modified_base (11)..(11): 5-methyl modified nucleotide
  modified_base (13)..(13): bicyclic nucleic acid (BNA)
  modified_base (14)..(14): bicyclic nucleic acid (BNA)
  source: /note="3' tri-ethylene glycol (TEG)"
aaguucuguccaag

SEQ ID NO: 21468 - RNA, 13 nt, Artificial Sequence
  source: /note="Description of Artificial Sequence: Synthetic oligonucleotide"
  source: /note="RNA"
  modified_base (1)..(1): bicyclic nucleic acid (BNA)
  modified_base (2)..(2): bicyclic nucleic acid (BNA)
  modified_base (6)..(6): 5-methyl modified nucleotide
  modified_base (10)..(10): 5-methyl modified nucleotide
  modified_base (11)..(11): 5-methyl modified nucleotide
  modified_base (12)..(12): bicyclic nucleic acid (BNA)
  modified_base (13)..(13): bicyclic nucleic acid (BNA)
  source: /note="3' tri-ethylene glycol (TEG)"
aaguucuguccaa

SEQ ID NO: 21469 - RNA, 12 nt, Artificial Sequence
  source: /note="Description of Artificial Sequence: Synthetic oligonucleotide"
  source: /note="RNA"
  modified_base (1)..(1): bicyclic nucleic acid (BNA)
  modified_base (2)..(2): bicyclic nucleic acid (BNA)
  modified_base (6)..(6): 5-methyl modified nucleotide
  modified_base (10)..(10): 5-methyl modified nucleotide
  modified_base (11)..(11): 5-methyl bicyclic nucleic acid
  modified_base (12)..(12): bicyclic nucleic acid (BNA)
  source: /note="3' tri-ethylene glycol (TEG)"
aaguucugucca

SEQ ID NO: 21470 - RNA, 11 nt, Artificial Sequence
  source: /note="Description of Artificial Sequence: Synthetic oligonucleotide"
  source: /note="RNA"
  modified_base (1)..(1): bicyclic nucleic acid (BNA)
  modified_base (2)..(2): bicyclic nucleic acid (BNA)
  modified_base (6)..(6): 5-methyl modified nucleotide
  modified_base (10)..(10): 5-methyl bicyclic nucleic acid
  modified_base (11)..(11): 5-methyl bicyclic nucleic acid
  source: /note="3' tri-ethylene glycol (TEG)"
aaguucugucc

SEQ ID NO: 21471 - DNA, 10 bp, Artificial Sequence
  source: /note="Description of Artificial Sequence: Synthetic oligonucleotide"
  source: /note="Description of Combined DNA/RNA Molecule: Synthetic oligonucleotide"
  source: /note="DNA/RNA"
  modified_base (1)..(1): bicyclic nucleic acid (BNA)
  modified_base (2)..(2): bicyclic nucleic acid (BNA)
  modified_base (6)..(6): 5-methyl modified nucleotide
  modified_base (9)..(9): bicyclic nucleic acid (BNA)
  modified_base (10)..(10): 5-methyl bicyclic nucleic acid
  source: /note="3' tri-ethylene glycol (TEG)"
aaguucugtc

SEQ ID NO: 21472 - DNA, 9 bp, Artificial Sequence
  source: /note="Description of Artificial Sequence: Synthetic oligonucleotide"
  source: /note="Description of Combined DNA/RNA Molecule: Synthetic oligonucleotide"
  source: /note="DNA/RNA"
  modified_base (1)..(1): bicyclic nucleic acid (BNA)
  modified_base (2)..(2): bicyclic nucleic acid (BNA)
  modified_base (6)..(6): 5-methyl modified nucleotide
  modified_base (8)..(8): bicyclic nucleic acid (BNA)
  modified_base (9)..(9): bicyclic nucleic acid (BNA)
  source: /note="3' tri-ethylene glycol (TEG)"
aaguucugt

SEQ ID NO: 21473 - DNA, 8 bp, Artificial Sequence
  source: /note="Description of Artificial Sequence: Synthetic oligonucleotide"
  source: /note="Description of Combined DNA/RNA Molecule: Synthetic oligonucleotide"
  source: /note="DNA/RNA"
  modified_base (1)..(1): bicyclic nucleic acid (BNA)
  modified_base (2)..(2): bicyclic nucleic acid (BNA)
  modified_base (6)..(6): 5-methyl modified nucleotide
  modified_base (7)..(7): bicyclic nucleic acid (BNA)
  modified_base (8)..(8): bicyclic nucleic acid (BNA)
  source: /note="3' tri-ethylene glycol (TEG)"
aaguuctg

SEQ ID NO: 21474 - DNA, 20 bp, Artificial Sequence
  source: /note="Description of Artificial Sequence: Synthetic oligonucleotide"
  source: /note="Description of Combined DNA/RNA Molecule: Synthetic oligonucleotide"
  source: /note="DNA/RNA"
  modified_base (1)..(1): bicyclic nucleic acid (BNA)
  modified_base (2)..(2): bicyclic nucleic acid (BNA)
  modified_base (7)..(7): 5-methyl modified nucleotide
  modified_base (11)..(11): 5-methyl modified nucleotide
  modified_base (12)..(12): 5-methyl modified nucleotide
  modified_base (16)..(16): 5-methyl modified nucleotide
  modified_base (17)..(17): 5-methyl modified nucleotide
  modified_base (18)..(18): 5-methyl modified nucleotide
  modified_base (19)..(19): bicyclic nucleic acid (BNA)
  modified_base (20)..(20): bicyclic nucleic acid (BNA)
  source: /note="3' tri-ethylene glycol (TEG)"
taaguucuguccaagcccgg

SEQ ID NO: 21475 - DNA, 19 bp, Artificial Sequence
  source: /note="Description of Artificial Sequence: Synthetic oligonucleotide"
  source: /note="Description of Combined DNA/RNA Molecule: Synthetic oligonucleotide"
  source: /note="DNA/RNA"
  modified_base (1)..(1): bicyclic nucleic acid (BNA)
  modified_base (2)..(2): bicyclic nucleic acid (BNA)
  modified_base (7)..(7): 5-methyl modified nucleotide
  modified_base (11)..(11): 5-methyl modified nucleotide
  modified_base (12)..(12): 5-methyl modified nucleotide
  modified_base (16)..(16): 5-methyl modified nucleotide
  modified_base (17)..(17): 5-methyl modified nucleotide
  modified_base (18)..(18): 5-methyl bicyclic nucleic acid
  modified_base (19)..(19): bicyclic nucleic acid (BNA)
  source: /note="3' tri-ethylene glycol (TEG)"
taaguucuguccaagcccg

SEQ ID NO: 21476 - DNA, 18 bp, Artificial Sequence
  source: /note="Description of Artificial Sequence: Synthetic oligonucleotide"
  source: /note="Description of Combined DNA/RNA Molecule: Synthetic oligonucleotide"
  source: /note="DNA/RNA"
  modified_base (1)..(1): bicyclic nucleic acid (BNA)
  modified_base (2)..(2): bicyclic nucleic acid (BNA)
  modified_base (7)..(7): 5-methyl modified nucleotide
  modified_base (11)..(11): 5-methyl modified nucleotide
  modified_base (12)..(12): 5-methyl modified nucleotide
  modified_base (16)..(16): 5-methyl modified nucleotide
  modified_base (17)..(17): 5-methyl bicyclic nucleic acid
  modified_base (18)..(18): 5-methyl bicyclic nucleic acid
  source: /note="3' tri-ethylene glycol (TEG)"
taaguucuguccaagccc

SEQ ID NO: 21477 - DNA, 17 bp, Artificial Sequence
  source: /note="Description of Artificial Sequence: Synthetic oligonucleotide"
  source: /note="Description of Combined DNA/RNA Molecule: Synthetic oligonucleotide"
  source: /note="DNA/RNA"
  modified_base (1)..(1): bicyclic nucleic acid (BNA)
  modified_base (2)..(2): bicyclic nucleic acid (BNA)
  modified_base (7)..(7): 5-methyl modified nucleotide
  modified_base (11)..(11): 5-methyl modified nucleotide
  modified_base (12)..(12): 5-methyl modified nucleotide
  modified_base (16)..(16): 5-methyl bicyclic nucleic acid
  modified_base (17)..(17): 5-methyl bicyclic nucleic acid
  source: /note="3' tri-ethylene glycol (TEG)"
taaguucuguccaagcc

SEQ ID NO: 21478 - DNA, 16 bp, Artificial Sequence
  source: /note="Description of Artificial Sequence: Synthetic oligonucleotide"
  source: /note="Description of Combined DNA/RNA Molecule: Synthetic oligonucleotide"
  source: /note="DNA/RNA"
  modified_base (1)..(1): bicyclic nucleic acid (BNA)
  modified_base (2)..(2): bicyclic nucleic acid (BNA)
  modified_base (7)..(7): 5-methyl modified nucleotide
  modified_base (11)..(11): 5-methyl modified nucleotide
  modified_base (12)..(12): 5-methyl modified nucleotide
  modified_base (15)..(15): bicyclic nucleic acid (BNA)
  modified_base (16)..(16): 5-methyl bicyclic nucleic acid
  source: /note="3' tri-ethylene glycol (TEG)"
taaguucuguccaagc

SEQ ID NO: 21479 - DNA, 14 bp, Artificial Sequence
  source: /note="Description of Artificial Sequence: Synthetic oligonucleotide"
  source: /note="Description of Combined DNA/RNA Molecule: Synthetic oligonucleotide"
  source: /note="DNA/RNA"
  modified_base (1)..(1): bicyclic nucleic acid (BNA)
  modified_base (2)..(2): bicyclic nucleic acid (BNA)
  modified_base (7)..(7): 5-methyl modified nucleotide
  modified_base (11)..(11): 5-methyl modified nucleotide
  modified_base (12)..(12): 5-methyl modified nucleotide
  modified_base (13)..(13): bicyclic nucleic acid (BNA)
  modified_base (14)..(14): bicyclic nucleic acid (BNA)
  source: /note="3' tri-ethylene glycol (TEG)"
taaguucuguccaa

SEQ ID NO: 21480 - DNA, 13 bp, Artificial Sequence
  source: /note="Description of Artificial Sequence: Synthetic oligonucleotide"
  source: /note="Description of Combined DNA/RNA Molecule: Synthetic oligonucleotide"
  source: /note="DNA/RNA"
  modified_base (1)..(1): bicyclic nucleic acid (BNA)
  modified_base (2)..(2): bicyclic nucleic acid (BNA)
  modified_base (7)..(7): 5-methyl modified nucleotide
  modified_base (11)..(11): 5-methyl modified nucleotide
  modified_base (12)..(12): 5-methyl bicyclic nucleic acid
  modified_base (13)..(13): bicyclic nucleic acid (BNA)
  source: /note="3' tri-ethylene glycol (TEG)"
taaguucugucca

SEQ ID NO: 21481 - DNA, 12 bp, Artificial Sequence
  source: /note="Description of Artificial Sequence: Synthetic oligonucleotide"
  source: /note="Description of Combined DNA/RNA Molecule: Synthetic oligonucleotide"
  source: /note="DNA/RNA"
  modified_base (1)..(1): bicyclic nucleic acid (BNA)
  modified_base (2)..(2): bicyclic nucleic acid (BNA)
  modified_base (7)..(7): 5-methyl modified nucleotide
  modified_base (11)..(11): 5-methyl bicyclic nucleic acid
  modified_base (12)..(12): 5-methyl bicyclic nucleic acid
  source: /note="3' tri-ethylene glycol (TEG)"
taaguucugucc

SEQ ID NO: 21482 - DNA, 11 bp, Artificial Sequence
  source: /note="Description of Artificial Sequence: Synthetic oligonucleotide"
  source: /note="Description of Combined DNA/RNA Molecule: Synthetic oligonucleotide"
  source: /note="DNA/RNA"
  modified_base (1)..(1): bicyclic nucleic acid (BNA)
  modified_base (2)..(2): bicyclic nucleic acid (BNA)
  modified_base (7)..(7): 5-methyl modified nucleotide
  modified_base (10)..(10): bicyclic nucleic acid (BNA)
  modified_base (11)..(11): 5-methyl bicyclic nucleic acid
  source: /note="3' tri-ethylene glycol (TEG)"
taaguucugtc

SEQ ID NO: 21483 - DNA, 10 bp, Artificial Sequence
  source: /note="Description of Artificial Sequence: Synthetic oligonucleotide"
  source: /note="Description of Combined DNA/RNA Molecule: Synthetic oligonucleotide"
  source: /note="DNA/RNA"
  modified_base (1)..(1): bicyclic nucleic acid (BNA)
  modified_base (2)..(2): bicyclic nucleic acid (BNA)
  modified_base (7)..(7): 5-methyl modified nucleotide
  modified_base (9)..(9): bicyclic nucleic acid (BNA)
  modified_base (10)..(10): bicyclic nucleic acid (BNA)
  source: /note="3' tri-ethylene glycol (TEG)"
taaguucugt

SEQ ID NO: 21484 - DNA, 9 bp, Artificial Sequence
  source: /note="Description of Artificial Sequence: Synthetic oligonucleotide"
  source: /note="Description of Combined DNA/RNA Molecule: Synthetic oligonucleotide"
  source: /note="DNA/RNA"
  modified_base (1)..(1): bicyclic nucleic acid (BNA)
  modified_base (2)..(2): bicyclic nucleic acid (BNA)
  modified_base (7)..(7): 5-methyl modified nucleotide
  modified_base (8)..(8): bicyclic nucleic acid (BNA)
  modified_base (9)..(9): bicyclic nucleic acid (BNA)
  source: /note="3' tri-ethylene glycol (TEG)"
taaguuctg

SEQ ID NO: 21485 - DNA, 8 bp, Artificial Sequence
  source: /note="Description of Artificial Sequence: Synthetic oligonucleotide"
  source: /note="Description of Combined DNA/RNA Molecule: Synthetic oligonucleotide"
  source: /note="DNA/RNA"
  modified_base (1)..(1): bicyclic nucleic acid (BNA)
  modified_base (2)..(2): bicyclic nucleic acid (BNA)
  modified_base (7)..(7): 5-methyl bicyclic nucleic acid
  modified_base (8)..(8): bicyclic nucleic acid (BNA)
  source: /note="3' tri-ethylene glycol (TEG)"
taaguuct

SEQ ID NO: 21486 - DNA, 20 bp, Artificial Sequence
  source: /note="Description of Artificial Sequence: Synthetic oligonucleotide"
  source: /note="Description of Combined DNA/RNA Molecule: Synthetic oligonucleotide"
  source: /note="DNA/RNA"
  modified_base (1)..(1): bicyclic nucleic acid (BNA)
  modified_base (2)..(2): bicyclic nucleic acid (BNA)
  modified_base (8)..(8): 5-methyl modified nucleotide
  modified_base (12)..(12): 5-methyl modified nucleotide
  modified_base (13)..(13): 5-methyl modified nucleotide
  modified_base (17)..(17): 5-methyl modified nucleotide
  modified_base (18)..(18): 5-methyl modified nucleotide
  modified_base (19)..(19): 5-methyl bicyclic nucleic acid
  modified_base (20)..(20): bicyclic nucleic acid (BNA)
  source: /note="3' tri-ethylene glycol (TEG)"
gtaaguucuguccaagcccg

SEQ ID NO: 21487 - DNA, 19 bp, Artificial Sequence
  source: /note="Description of Artificial Sequence: Synthetic oligonucleotide"
  source: /note="Description of Combined DNA/RNA Molecule: Synthetic oligonucleotide"
  source: /note="DNA/RNA"
  modified_base (1)..(1): bicyclic nucleic acid (BNA)
  modified_base (2)..(2): bicyclic nucleic acid (BNA)
  modified_base (8)..(8): 5-methyl modified nucleotide
  modified_base (12)..(12): 5-methyl modified nucleotide
  modified_base (13)..(13): 5-methyl modified nucleotide
  modified_base (17)..(17): 5-methyl modified nucleotide
  modified_base (18)..(18): 5-methyl bicyclic nucleic acid
  modified_base (19)..(19): 5-methyl bicyclic nucleic acid
  source: /note="3' tri-ethylene glycol (TEG)"
gtaaguucuguccaagccc

SEQ ID NO: 21488 - DNA, 17 bp, Artificial Sequence
  source: /note="Description of Artificial Sequence: Synthetic oligonucleotide"
  source: /note="Description of Combined DNA/RNA Molecule: Synthetic oligonucleotide"
  source: /note="DNA/RNA"
  modified_base (1)..(1): bicyclic nucleic acid (BNA)
  modified_base (2)..(2): bicyclic nucleic acid (BNA)
  modified_base (8)..(8): 5-methyl modified nucleotide
  modified_base (12)..(12): 5-methyl modified nucleotide
  modified_base (13)..(13): 5-methyl modified nucleotide
  modified_base (16)..(16): bicyclic nucleic acid (BNA)
  modified_base (17)..(17): 5-methyl bicyclic nucleic acid
  source: /note="3' tri-ethylene glycol (TEG)"
gtaaguucuguccaagc

SEQ ID NO: 21489 - DNA, 16 bp, Artificial Sequence
  source: /note="Description of Artificial Sequence: Synthetic oligonucleotide"
  source: /note="Description of Combined DNA/RNA Molecule: Synthetic oligonucleotide"
  source: /note="DNA/RNA"
  modified_base (1)..(1): bicyclic nucleic acid (BNA)
  modified_base (2)..(2): bicyclic nucleic acid (BNA)
  modified_base (8)..(8): 5-methyl modified nucleotide
  modified_base (12)..(12): 5-methyl modified nucleotide
  modified_base (13)..(13): 5-methyl modified nucleotide
  modified_base (15)..(15): bicyclic nucleic acid (BNA)
  modified_base (16)..(16): bicyclic nucleic acid (BNA)
  source: /note="3' tri-ethylene glycol (TEG)"
gtaaguucuguccaag

SEQ ID NO: 21490 - DNA, 15 bp, Artificial Sequence
  source: /note="Description of Artificial Sequence: Synthetic oligonucleotide"
  source: /note="Description of Combined DNA/RNA Molecule: Synthetic oligonucleotide"
  source: /note="DNA/RNA"
  modified_base (1)..(1): bicyclic nucleic acid (BNA)
  modified_base (2)..(2): bicyclic nucleic acid (BNA)
  modified_base (8)..(8): 5-methyl modified nucleotide
  modified_base (12)..(12): 5-methyl modified nucleotide
  modified_base (13)..(13): 5-methyl modified nucleotide
  modified_base (14)..(14): bicyclic nucleic acid (BNA)
  modified_base (15)..(15): bicyclic nucleic acid (BNA)
  source: /note="3' tri-ethylene glycol (TEG)"
gtaaguucuguccaa

SEQ ID NO: 21491 - DNA, 14 bp, Artificial Sequence
  source: /note="Description of Artificial Sequence: Synthetic oligonucleotide"
  source: /note="Description of Combined DNA/RNA Molecule: Synthetic oligonucleotide"
  source: /note="DNA/RNA"
  modified_base (1)..(1): bicyclic nucleic acid (BNA)
  modified_base (2)..(2): bicyclic nucleic acid (BNA)
  modified_base (8)..(8): 5-methyl modified nucleotide
  modified_base (12)..(12): 5-methyl modified nucleotide
  modified_base (13)..(13): 5-methyl bicyclic nucleic acid
  modified_base (14)..(14): bicyclic nucleic acid (BNA)
  source: /note="3' tri-ethylene glycol (TEG)"
gtaaguucugucca

SEQ ID NO: 21492 - DNA, 13 bp, Artificial Sequence
  source: /note="Description of Artificial Sequence: Synthetic oligonucleotide"
  source: /note="Description of Combined DNA/RNA Molecule: Synthetic oligonucleotide"
  source: /note="DNA/RNA"
  modified_base (1)..(1): bicyclic nucleic acid (BNA)
  modified_base (2)..(2): bicyclic nucleic acid (BNA)
  modified_base (8)..(8): 5-methyl modified nucleotide
  modified_base (12)..(12): 5-methyl bicyclic nucleic acid
  modified_base (13)..(13): 5-methyl bicyclic nucleic acid
  source: /note="3' tri-ethylene glycol (TEG)"
gtaaguucugucc

SEQ ID NO: 21493 - DNA, 12 bp, Artificial Sequence
  source: /note="Description of Artificial Sequence: Synthetic oligonucleotide"
  source: /note="Description of Combined DNA/RNA Molecule: Synthetic oligonucleotide"
  source: /note="DNA/RNA"
  modified_base (1)..(1): bicyclic nucleic acid (BNA)
  modified_base (2)..(2): bicyclic nucleic acid (BNA)
  modified_base (8)..(8): 5-methyl modified nucleotide
  modified_base (11)..(11): bicyclic nucleic acid (BNA)
  modified_base (12)..(12): 5-methyl bicyclic nucleic acid
  source: /note="3' tri-ethylene glycol (TEG)"
gtaaguucugtc

SEQ ID NO: 21494 - DNA, 11 bp, Artificial Sequence
  source: /note="Description of Artificial Sequence: Synthetic oligonucleotide"
  source: /note="Description of Combined DNA/RNA Molecule: Synthetic oligonucleotide"
  source: /note="DNA/RNA"
  modified_base (1)..(1): bicyclic nucleic acid (BNA)
  modified_base (2)..(2): bicyclic nucleic acid (BNA)
  modified_base (8)..(8): 5-methyl modified nucleotide
  modified_base (10)..(10): bicyclic nucleic acid (BNA)
  modified_base (11)..(11): bicyclic nucleic acid (BNA)
  source: /note="3' tri-ethylene glycol (TEG)"
gtaaguucugt

SEQ ID NO: 21495 - DNA, 10 bp, Artificial Sequence
  source: /note="Description of Artificial Sequence: Synthetic oligonucleotide"
  source: /note="Description of Combined DNA/RNA Molecule: Synthetic oligonucleotide"
  source: /note="DNA/RNA"
  modified_base (1)..(1): bicyclic nucleic acid (BNA)
  modified_base (2)..(2): bicyclic nucleic acid (BNA)
  modified_base (8)..(8): 5-methyl modified nucleotide
  modified_base (9)..(9): bicyclic nucleic acid (BNA)
  modified_base (10)..(10): bicyclic nucleic acid (BNA)
  source: /note="3' tri-ethylene glycol (TEG)"
gtaaguuctg

SEQ ID NO: 21496 - DNA, 9 bp, Artificial Sequence
  source: /note="Description of Artificial Sequence: Synthetic oligonucleotide"
  source: /note="Description of Combined DNA/RNA Molecule: Synthetic oligonucleotide"
  source: /note="DNA/RNA"
  modified_base (1)..(1): bicyclic nucleic acid (BNA)
  modified_base (2)..(2): bicyclic nucleic acid (BNA)
  modified_base (8)..(8): 5-methyl bicyclic nucleic acid
  modified_base (9)..(9): bicyclic nucleic acid (BNA)
  source: /note="3' tri-ethylene glycol (TEG)"
gtaaguuct

SEQ ID NO: 21497 - DNA, 8 bp, Artificial Sequence
  source: /note="Description of Artificial Sequence: Synthetic oligonucleotide"
  source: /note="Description of Combined DNA/RNA Molecule: Synthetic oligonucleotide"
  source: /note="DNA/RNA"
  modified_base (1)..(1): bicyclic nucleic acid (BNA)
  modified_base (2)..(2): bicyclic nucleic acid (BNA)
  modified_base (7)..(7): bicyclic nucleic acid (BNA)
  modified_base (8)..(8): 5-methyl bicyclic nucleic acid
  source: /note="3' tri-ethylene glycol (TEG)"
gtaagutc

SEQ ID NO: 21498 - RNA, 20 nt, Artificial Sequence
  source: /note="Description of Artificial Sequence: Synthetic oligonucleotide"
  source: /note="RNA"
  modified_base (1)..(1): bicyclic nucleic acid (BNA)
  modified_base (2)..(2): bicyclic nucleic acid (BNA)
  modified_base (9)..(9): 5-methyl modified nucleotide
  modified_base (13)..(13): 5-methyl modified nucleotide
  modified_base (14)..(14): 5-methyl modified nucleotide
  modified_base (18)..(18): 5-methyl modified nucleotide
  modified_base (19)..(19): 5-methyl bicyclic nucleic acid
  modified_base (20)..(20): 5-methyl bicyclic nucleic acid
  source: /note="3' tri-ethylene glycol (TEG)"
gguaaguucuguccaagccc

SEQ ID NO: 21499 - RNA, 19 nt, Artificial Sequence
  source: /note="Description of Artificial Sequence: Synthetic oligonucleotide"
  source: /note="RNA"
  modified_base (1)..(1): bicyclic nucleic acid (BNA)
  modified_base (2)..(2): bicyclic nucleic acid (BNA)
  modified_base (9)..(9): 5-methyl modified nucleotide
  modified_base (13)..(13): 5-methyl modified nucleotide
  modified_base (14)..(14): 5-methyl modified nucleotide
  modified_base (18)..(18): 5-methyl bicyclic nucleic acid
  modified_base (19)..(19): 5-methyl bicyclic nucleic acid
  source: /note="3' tri-ethylene glycol (TEG)"
gguaaguucuguccaagcc

SEQ ID NO: 21500 - RNA, 17 nt, Artificial Sequence
  source: /note="Description of Artificial Sequence: Synthetic oligonucleotide"
  source: /note="RNA"
  modified_base (1)..(1): bicyclic nucleic acid (BNA)
  modified_base (2)..(2): bicyclic nucleic acid (BNA)
  modified_base (9)..(9): 5-methyl modified nucleotide
  modified_base (13)..(13): 5-methyl modified nucleotide
  modified_base (14)..(14): 5-methyl modified nucleotide
  modified_base (16)..(16): bicyclic nucleic acid (BNA)
  modified_base (17)..(17): bicyclic nucleic acid (BNA)
  source: /note="3' tri-ethylene glycol (TEG)"
gguaaguucuguccaag

SEQ ID NO: 21501 - RNA, 16 nt, Artificial Sequence
  source: /note="Description of Artificial Sequence: Synthetic oligonucleotide"
  source: /note="RNA"
  modified_base (1)..(1): bicyclic nucleic acid (BNA)
  modified_base (2)..(2): bicyclic nucleic acid (BNA)
  modified_base (9)..(9): 5-methyl modified nucleotide
  modified_base (13)..(13): 5-methyl modified nucleotide
  modified_base (14)..(14): 5-methyl modified nucleotide
  modified_base (15)..(15): bicyclic nucleic acid (BNA)
  modified_base (16)..(16): bicyclic nucleic acid (BNA)
  source: /note="3' tri-ethylene glycol (TEG)"
gguaaguucuguccaa

SEQ ID NO: 21502 - RNA, 15 nt, Artificial Sequence
  source: /note="Description of Artificial Sequence: Synthetic oligonucleotide"
  source: /note="RNA"
  modified_base (1)..(1): bicyclic nucleic acid (BNA)
  modified_base (2)..(2): bicyclic nucleic acid (BNA)
  modified_base (9)..(9): 5-methyl modified nucleotide
  modified_base (13)..(13): 5-methyl modified nucleotide
  modified_base (14)..(14): 5-methyl bicyclic nucleic acid
  modified_base (15)..(15): bicyclic nucleic acid (BNA)
  source: /note="3' tri-ethylene glycol (TEG)"
gguaaguucugucca

SEQ ID NO: 21503 - RNA, 14 nt, Artificial Sequence
  source: /note="Description of Artificial Sequence: Synthetic oligonucleotide"
  source: /note="RNA"
  modified_base (1)..(1): bicyclic nucleic acid (BNA)
  modified_base (2)..(2): bicyclic nucleic acid (BNA)
  modified_base (9)..(9): 5-methyl modified nucleotide
  modified_base (13)..(13): 5-methyl bicyclic nucleic acid
  modified_base (14)..(14): 5-methyl bicyclic nucleic acid
  source: /note="3' tri-ethylene glycol (TEG)"
gguaaguucugucc

SEQ ID NO: 21504 - DNA, 13 bp, Artificial Sequence
  source: /note="Description of Artificial Sequence: Synthetic oligonucleotide"
  source: /note="Description of Combined DNA/RNA Molecule: Synthetic oligonucleotide"
  source: /note="DNA/RNA"
  modified_base (1)..(1): bicyclic nucleic acid (BNA)
  modified_base (2)..(2): bicyclic nucleic acid (BNA)
  modified_base (9)..(9): 5-methyl modified nucleotide
  modified_base (12)..(12): bicyclic nucleic acid (BNA)
  modified_base (13)..(13): 5-methyl bicyclic nucleic acid
  source: /note="3' tri-ethylene glycol (TEG)"
gguaaguucugtc

SEQ ID NO: 21505 - DNA, 12 bp, Artificial Sequence
  source: /note="Description of Artificial Sequence: Synthetic oligonucleotide"
  source: /note="Description of Combined DNA/RNA Molecule: Synthetic oligonucleotide"
  source: /note="DNA/RNA"
  modified_base (1)..(1): bicyclic nucleic acid (BNA)
  modified_base (2)..(2): bicyclic nucleic acid (BNA)
  modified_base (9)..(9): 5-methyl modified nucleotide
  modified_base (11)..(11): bicyclic nucleic acid (BNA)
  modified_base (12)..(12): bicyclic nucleic acid (BNA)
  source: /note="3' tri-ethylene glycol (TEG)"
gguaaguucugt

SEQ ID NO: 21506 - DNA, 11 bp, Artificial Sequence
  source: /note="Description of Artificial Sequence: Synthetic oligonucleotide"
  source: /note="Description of Combined DNA/RNA Molecule: Synthetic oligonucleotide"
  source: /note="DNA/RNA"
  modified_base (1)..(1): bicyclic nucleic acid (BNA)
  modified_base (2)..(2): bicyclic nucleic acid (BNA)
  modified_base (9)..(9): 5-methyl modified nucleotide
  modified_base (10)..(10): bicyclic nucleic acid (BNA)
  modified_base (11)..(11): bicyclic nucleic acid (BNA)
  source: /note="3' tri-ethylene glycol (TEG)"
gguaaguuctg

SEQ ID NO: 21507 - DNA, 10 bp, Artificial Sequence
  source: /note="Description of Artificial Sequence: Synthetic oligonucleotide"
  source: /note="Description of Combined DNA/RNA Molecule: Synthetic oligonucleotide"
  source: /note="DNA/RNA"
  modified_base (1)..(1): bicyclic nucleic acid (BNA)
  modified_base (2)..(2): bicyclic nucleic acid (BNA)
  modified_base (9)..(9): 5-methyl bicyclic nucleic acid
  modified_base (10)..(10): bicyclic nucleic acid (BNA)
  source: /note="3' tri-ethylene glycol (TEG)"
gguaaguuct

SEQ ID NO: 21508 - DNA, 9 bp, Artificial Sequence
  source: /note="Description of Artificial Sequence: Synthetic oligonucleotide"
  source: /note="Description of Combined DNA/RNA Molecule: Synthetic oligonucleotide"
  source: /note="DNA/RNA"
  modified_base (1)..(1): bicyclic nucleic acid (BNA)
  modified_base (2)..(2): bicyclic nucleic acid (BNA)
  modified_base (8)..(8): bicyclic nucleic acid (BNA)
  modified_base (9)..(9): 5-methyl bicyclic nucleic acid
  source: /note="3' tri-ethylene glycol (TEG)"
gguaagutc

SEQ ID NO: 21509 - DNA, 8 bp, Artificial Sequence
  source: /note="Description of Artificial Sequence: Synthetic oligonucleotide"
  source: /note="Description of Combined DNA/RNA Molecule: Synthetic oligonucleotide"
  source: /note="DNA/RNA"
  modified_base (1)..(1): bicyclic nucleic acid (BNA)
  modified_base (2)..(2): bicyclic nucleic acid (BNA)
  modified_base (7)..(7): bicyclic nucleic acid (BNA)
  modified_base (8)..(8): bicyclic nucleic acid (BNA)
  source: /note="3' tri-ethylene glycol (TEG)"
gguaagtt

SEQ ID NO: 21510 - RNA, 20 nt, Artificial Sequence
  source: /note="Description of Artificial Sequence: Synthetic oligonucleotide"
  source: /note="RNA"
  modified_base (1)..(1): 5-methyl bicyclic nucleic acid
  modified_base (2)..(2): bicyclic nucleic acid (BNA)
  modified_base (10)..(10): 5-methyl modified nucleotide
  modified_base (14)..(14): 5-methyl modified nucleotide
  modified_base (15)..(15): 5-methyl modified nucleotide
  modified_base (19)..(19): 5-methyl bicyclic nucleic acid
  modified_base (20)..(20): 5-methyl bicyclic nucleic acid
  source: /note="3' tri-ethylene glycol (TEG)"
cgguaaguucuguccaagcc

SEQ ID NO: 21511 - RNA, 19 nt, Artificial Sequence
  source: /note="Description of Artificial Sequence: Synthetic oligonucleotide"
  source: /note="RNA"
  modified_base (1)..(1): 5-methyl bicyclic nucleic acid
  modified_base (2)..(2): bicyclic nucleic acid (BNA)
  modified_base (10)..(10): 5-methyl modified nucleotide
  modified_base (14)..(14): 5-methyl modified nucleotide
  modified_base (15)..(15): 5-methyl modified nucleotide
  modified_base (18)..(18): bicyclic nucleic acid (BNA)
  modified_base (19)..(19): 5-methyl bicyclic nucleic acid
  source: /note="3' tri-ethylene glycol (TEG)"
cgguaaguucuguccaagc

SEQ ID NO: 21512 - RNA, 18 nt, Artificial Sequence
  source: /note="Description of Artificial Sequence: Synthetic oligonucleotide"
  source: /note="RNA"
  modified_base (1)..(1): 5-methyl bicyclic nucleic acid
  modified_base (2)..(2): bicyclic nucleic acid (BNA)
  modified_base (10)..(10): 5-methyl modified nucleotide
  modified_base (14)..(14): 5-methyl modified nucleotide
  modified_base (15)..(15): 5-methyl modified nucleotide
  modified_base (17)..(17): bicyclic nucleic acid (BNA)
  modified_base (18)..(18): bicyclic nucleic acid (BNA)
  source: /note="3' tri-ethylene glycol (TEG)"
cgguaaguucuguccaag

SEQ ID NO: 21513 - RNA, 17 nt, Artificial Sequence
  source: /note="Description of Artificial Sequence: Synthetic oligonucleotide"
  source: /note="RNA"
  modified_base (1)..(1): 5-methyl bicyclic nucleic acid
  modified_base (2)..(2): bicyclic nucleic acid (BNA)
  modified_base (10)..(10): 5-methyl modified nucleotide
  modified_base (14)..(14): 5-methyl modified nucleotide
  modified_base (15)..(15): 5-methyl modified nucleotide
  modified_base (16)..(16): bicyclic nucleic acid (BNA)
  modified_base (17)..(17): bicyclic nucleic acid (BNA)
  source: /note="3' tri-ethylene glycol (TEG)"
cgguaaguucuguccaa

SEQ ID NO: 21514 - RNA, 16 nt, Artificial Sequence
  source: /note="Description of Artificial Sequence: Synthetic oligonucleotide"
  source: /note="RNA"
  modified_base (1)..(1): 5-methyl bicyclic nucleic acid
  modified_base (2)..(2): bicyclic nucleic acid (BNA)
  modified_base (10)..(10): 5-methyl modified nucleotide
  modified_base (14)..(14): 5-methyl modified nucleotide
  modified_base (15)..(15): 5-methyl bicyclic nucleic acid
  modified_base (16)..(16): bicyclic nucleic acid (BNA)
  source: /note="3' tri-ethylene glycol (TEG)"
cgguaaguucugucca

SEQ ID NO: 21515 - RNA, 15 nt, Artificial Sequence
  source: /note="Description of Artificial Sequence: Synthetic oligonucleotide"
  source: /note="RNA"
  modified_base (1)..(1): 5-methyl bicyclic nucleic acid
  modified_base (2)..(2): bicyclic nucleic acid (BNA)
  modified_base (10)..(10): 5-methyl modified nucleotide
  modified_base (14)..(14): 5-methyl bicyclic nucleic acid
  modified_base (15)..(15): 5-methyl bicyclic nucleic acid
  source: /note="3' tri-ethylene glycol (TEG)"
cgguaaguucugucc

SEQ ID NO: 21516 - DNA, 14 bp, Artificial Sequence
  source: /note="Description of Artificial Sequence: Synthetic oligonucleotide"
  source: /note="Description of Combined DNA/RNA Molecule: Synthetic oligonucleotide"
  source: /note="DNA/RNA"
  modified_base (1)..(1): 5-methyl bicyclic nucleic acid
  modified_base (2)..(2): bicyclic nucleic acid (BNA)
  modified_base (10)..(10): 5-methyl modified nucleotide
  modified_base (13)..(13): bicyclic nucleic acid (BNA)
  modified_base (14)..(14): 5-methyl bicyclic nucleic acid
  source: /note="3' tri-ethylene glycol (TEG)"
cgguaaguucugtc

SEQ ID NO: 21517 - DNA, 13 bp, Artificial Sequence
  source: /note="Description of Artificial Sequence: Synthetic oligonucleotide"
  source: /note="Description of Combined DNA/RNA Molecule: Synthetic oligonucleotide"
  source: /note="DNA/RNA"
  modified_base (1)..(1): 5-methyl bicyclic nucleic acid
  modified_base (2)..(2): bicyclic nucleic acid (BNA)
  modified_base (10)..(10): 5-methyl modified nucleotide
  modified_base (12)..(12): bicyclic nucleic acid (BNA)
  modified_base (13)..(13): bicyclic nucleic acid (BNA)
  source: /note="3' tri-ethylene glycol (TEG)"
cgguaaguucugt

SEQ ID NO: 21518 - DNA, 12 bp, Artificial Sequence
  source: /note="Description of Artificial Sequence: Synthetic oligonucleotide"
  source: /note="Description of Combined DNA/RNA Molecule: Synthetic oligonucleotide"
  source: /note="DNA/RNA"
  modified_base (1)..(1): 5-methyl bicyclic nucleic acid
  modified_base (2)..(2): bicyclic nucleic acid (BNA)
  modified_base (10)..(10): 5-methyl modified nucleotide
  modified_base (11)..(11): bicyclic nucleic acid (BNA)
  modified_base (12)..(12): bicyclic nucleic acid (BNA)
  source: /note="3' tri-ethylene glycol (TEG)"
cgguaaguuctg

SEQ ID NO: 21519 - DNA, 11 bp, Artificial Sequence
  source: /note="Description of Artificial Sequence: Synthetic oligonucleotide"
  source: /note="Description of Combined DNA/RNA Molecule: Synthetic oligonucleotide"
  source: /note="DNA/RNA"
  modified_base (1)..(1): 5-methyl bicyclic nucleic acid
  modified_base (2)..(2): bicyclic nucleic acid (BNA)
  modified_base (10)..(10): 5-methyl bicyclic nucleic acid
  modified_base (11)..(11): bicyclic nucleic acid (BNA)
  source: /note="3' tri-ethylene glycol (TEG)"
cgguaaguuct

SEQ ID NO: 21520 - DNA, 10 bp, Artificial Sequence
  source: /note="Description of Artificial Sequence: Synthetic oligonucleotide"
  source: /note="Description of Combined DNA/RNA Molecule: Synthetic oligonucleotide"
  source: /note="DNA/RNA"
  modified_base (1)..(1): 5-methyl bicyclic nucleic acid
  modified_base (2)..(2): bicyclic nucleic acid (BNA)
  modified_base (9)..(9): bicyclic nucleic acid (BNA)
  modified_base (10)..(10): 5-methyl bicyclic nucleic acid
  source: /note="3' tri-ethylene glycol (TEG)"
cgguaagutc

SEQ ID NO: 21521 - DNA, 9 bp, Artificial Sequence
  source: /note="Description of Artificial Sequence: Synthetic oligonucleotide"
  source: /note="Description of Combined DNA/RNA Molecule: Synthetic oligonucleotide"
  source: /note="DNA/RNA"
  modified_base (1)..(1): 5-methyl bicyclic nucleic acid
  modified_base (2)..(2): bicyclic nucleic acid (BNA)
  modified_base (8)..(8): bicyclic nucleic acid (BNA)
  modified_base (9)..(9): bicyclic nucleic acid (BNA)
  source: /note="3' tri-ethylene glycol (TEG)"
cgguaagtt

SEQ ID NO: 21522 - DNA, 8 bp, Artificial Sequence
  source: /note="Description of Artificial Sequence: Synthetic oligonucleotide"
  source: /note="Description of Combined DNA/RNA Molecule: Synthetic oligonucleotide"
  source: /note="DNA/RNA"
  modified_base (1)..(1): 5-methyl bicyclic nucleic acid
  modified_base (2)..(2): bicyclic nucleic acid (BNA)
  modified_base (7)..(7): bicyclic nucleic acid (BNA)
  modified_base (8)..(8): bicyclic nucleic acid (BNA)
  source: /note="3' tri-ethylene glycol (TEG)"
cgguaagt

SEQ ID NO: 21523 - DNA, 20 bp, Artificial Sequence
  source: /note="Description of Artificial Sequence: Synthetic oligonucleotide"
  source: /note="Description of Combined DNA/RNA Molecule: Synthetic oligonucleotide"
  source: /note="DNA/RNA"
  modified_base (1)..(1): bicyclic nucleic acid (BNA)
  modified_base (2)..(2): 5-methyl bicyclic nucleic acid
  modified_base (11)..(11): 5-methyl modified nucleotide
  modified_base (15)..(15): 5-methyl modified nucleotide
  modified_base (16)..(16): 5-methyl modified nucleotide
  modified_base (19)..(19): bicyclic nucleic acid (BNA)
  modified_base (20)..(20): 5-methyl bicyclic nucleic acid
  source: /note="3' tri-ethylene glycol (TEG)"
tcgguaaguucuguccaagc

SEQ ID NO: 21524 - DNA, 19 bp, Artificial Sequence
  source: /note="Description of Artificial Sequence: Synthetic oligonucleotide"
  source: /note="Description of Combined DNA/RNA Molecule: Synthetic oligonucleotide"
  source: /note="DNA/RNA"
  modified_base (1)..(1): bicyclic nucleic acid (BNA)
  modified_base (2)..(2): 5-methyl bicyclic nucleic acid
  modified_base (11)..(11): 5-methyl modified nucleotide
  modified_base (15)..(15): 5-methyl modified nucleotide
  modified_base (16)..(16): 5-methyl modified nucleotide
  modified_base (18)..(18): bicyclic nucleic acid (BNA)
  modified_base (19)..(19): bicyclic nucleic acid (BNA)
  source: /note="3' tri-ethylene glycol (TEG)"
tcgguaaguucuguccaag

SEQ ID NO: 21525 - DNA, 18 bp, Artificial Sequence
  source: /note="Description of Artificial Sequence: Synthetic oligonucleotide"
  source: /note="Description of Combined DNA/RNA Molecule: Synthetic oligonucleotide"
  source: /note="DNA/RNA"
  modified_base (1)..(1): bicyclic nucleic acid (BNA)
  modified_base (2)..(2): 5-methyl bicyclic nucleic acid
  modified_base (11)..(11): 5-methyl modified nucleotide
  modified_base (15)..(15): 5-methyl modified nucleotide
  modified_base (16)..(16): 5-methyl modified nucleotide
  modified_base (17)..(17): bicyclic nucleic acid (BNA)
  modified_base (18)..(18): bicyclic nucleic acid (BNA)
  source: /note="3' tri-ethylene glycol (TEG)"
tcgguaaguucuguccaa

SEQ ID NO: 21526 - DNA, 17 bp, Artificial Sequence
  source: /note="Description of Artificial Sequence: Synthetic oligonucleotide"
  source: /note="Description of Combined DNA/RNA Molecule: Synthetic oligonucleotide"
  source: /note="DNA/RNA"
  modified_base (1)..(1): bicyclic nucleic acid (BNA)
  modified_base (2)..(2): 5-methyl bicyclic nucleic acid
  modified_base (11)..(11): 5-methyl modified nucleotide
  modified_base (15)..(15): 5-methyl modified nucleotide
  modified_base (16)..(16): 5-methyl bicyclic nucleic acid
  modified_base (17)..(17): bicyclic nucleic acid (BNA)
  source: /note="3' tri-ethylene glycol (TEG)"
tcgguaaguucugucca

SEQ ID NO: 21527 - DNA, 16 bp, Artificial Sequence
  source: /note="Description of Artificial Sequence: Synthetic oligonucleotide"
  source: /note="Description of Combined DNA/RNA Molecule: Synthetic oligonucleotide"
  source: /note="DNA/RNA"
  modified_base (1)..(1): bicyclic nucleic acid (BNA)
  modified_base (2)..(2): 5-methyl bicyclic nucleic acid
  modified_base (11)..(11): 5-methyl modified nucleotide
  modified_base (15)..(15): 5-methyl bicyclic nucleic acid
  modified_base (16)..(16): 5-methyl bicyclic nucleic acid
  source: /note="3' tri-ethylene glycol (TEG)"
tcgguaaguucugucc

SEQ ID NO: 21528 - DNA, 15 bp, Artificial Sequence
  source: /note="Description of Artificial Sequence: Synthetic oligonucleotide"
  source: /note="Description of Combined DNA/RNA Molecule: Synthetic oligonucleotide"
  source: /note="DNA/RNA"
  modified_base (1)..(1): bicyclic nucleic acid (BNA)
  modified_base (2)..(2): 5-methyl bicyclic nucleic acid
  modified_base (11)..(11): 5-methyl modified nucleotide
  modified_base (14)..(14): bicyclic nucleic acid (BNA)
  modified_base (15)..(15): 5-methyl bicyclic nucleic acid
  source: /note="3' tri-ethylene glycol (TEG)"
tcgguaaguucugtc

SEQ ID NO: 21529 - DNA, 14 bp, Artificial Sequence
  source: /note="Description of Artificial Sequence: Synthetic oligonucleotide"
  source: /note="Description of Combined DNA/RNA Molecule: Synthetic oligonucleotide"
  source: /note="DNA/RNA"
  modified_base (1)..(1): bicyclic nucleic acid (BNA)
  modified_base (2)..(2): 5-methyl bicyclic nucleic acid
  modified_base (11)..(11): 5-methyl modified nucleotide
  modified_base (13)..(13): bicyclic nucleic acid (BNA)
  modified_base (14)..(14): bicyclic nucleic acid (BNA)
  source: /note="3' tri-ethylene glycol (TEG)"
tcgguaaguucugt

SEQ ID NO: 21530 - DNA, 13 bp, Artificial Sequence
  source: /note="Description of Artificial Sequence: Synthetic oligonucleotide"
  source: /note="Description of Combined DNA/RNA Molecule: Synthetic oligonucleotide"
  source: /note="DNA/RNA"
  modified_base (1)..(1): bicyclic nucleic acid (BNA)
  modified_base (2)..(2): 5-methyl bicyclic nucleic acid
  modified_base (11)..(11): 5-methyl modified nucleotide
  modified_base (12)..(12): bicyclic nucleic acid (BNA)
  modified_base (13)..(13): bicyclic nucleic acid (BNA)
  source: /note="3' tri-ethylene glycol (TEG)"
tcgguaaguuctg

SEQ ID NO: 21531 - DNA, 12 bp, Artificial Sequence
  source: /note="Description of Artificial Sequence: Synthetic oligonucleotide"
  source: /note="Description of Combined DNA/RNA Molecule: Synthetic oligonucleotide"
  source: /note="DNA/RNA"
  modified_base (1)..(1): bicyclic nucleic acid (BNA)
  modified_base (2)..(2): 5-methyl bicyclic nucleic acid
  modified_base (11)..(11): 5-methyl bicyclic nucleic acid
  modified_base (12)..(12): bicyclic nucleic acid (BNA)
  source: /note="3' tri-ethylene glycol (TEG)"
tcgguaaguuct

SEQ ID NO: 21532 - DNA, 11 bp, Artificial Sequence
  source: /note="Description of Artificial Sequence: Synthetic oligonucleotide"
  source: /note="Description of Combined DNA/RNA Molecule: Synthetic oligonucleotide"
  source: /note="DNA/RNA"
  modified_base (1)..(1): bicyclic nucleic acid (BNA)
  modified_base (2)..(2): 5-methyl bicyclic nucleic acid
  modified_base (10)..(10): bicyclic nucleic acid (BNA)
  modified_base (11)..(11): 5-methyl bicyclic nucleic acid
  source: /note="3' tri-ethylene glycol (TEG)"
tcgguaagutc

SEQ ID NO: 21533 - DNA, 10 bp, Artificial Sequence
  source: /note="Description of Artificial Sequence: Synthetic oligonucleotide"
  source: /note="Description of Combined DNA/RNA Molecule: Synthetic oligonucleotide"
  source: /note="DNA/RNA"
  modified_base (1)..(1): bicyclic nucleic acid (BNA)
  modified_base (2)..(2): 5-methyl bicyclic nucleic acid
  modified_base (9)..(9): bicyclic nucleic acid (BNA)
  modified_base (10)..(10): bicyclic nucleic acid (BNA)
  source: /note="3' tri-ethylene glycol (TEG)"
tcgguaagtt

SEQ ID NO: 21534 - DNA, 9 bp, Artificial Sequence
  source: /note="Description of Artificial Sequence: Synthetic oligonucleotide"
  source: /note="Description of Combined DNA/RNA Molecule: Synthetic oligonucleotide"
  source: /note="DNA/RNA"
  modified_base (1)..(1): bicyclic nucleic acid (BNA)
  modified_base (2)..(2): 5-methyl bicyclic nucleic acid
  modified_base (8)..(8): bicyclic nucleic acid (BNA)
  modified_base (9)..(9): bicyclic nucleic acid (BNA)
  source: /note="3' tri-ethylene glycol (TEG)"
tcgguaagt

SEQ ID NO: 21535 - DNA, 20 bp, Artificial Sequence
  source: /note="Description of Artificial Sequence: Synthetic oligonucleotide"
  source: /note="Description of Combined DNA/RNA Molecule: Synthetic oligonucleotide"
  source: /note="DNA/RNA"
  modified_base (1)..(1): bicyclic nucleic acid (BNA)
  modified_base (2)..(2): bicyclic nucleic acid (BNA)
  modified_base (3)..(3): 5-methyl modified nucleotide
  modified_base (12)..(12): 5-methyl modified nucleotide
  modified_base (16)..(16): 5-methyl modified nucleotide
  modified_base (17)..(17): 5-methyl modified nucleotide
  modified_base (19)..(19): bicyclic nucleic acid (BNA)
  modified_base (20)..(20): bicyclic nucleic acid (BNA)
  source: /note="3' tri-ethylene glycol (TEG)"
gtcgguaaguucuguccaag

SEQ ID NO: 21536 - DNA, 19 bp, Artificial Sequence
  source: /note="Description of Artificial Sequence: Synthetic oligonucleotide"
  source: /note="Description of Combined DNA/RNA Molecule: Synthetic oligonucleotide"
  source: /note="DNA/RNA"
  modified_base (1)..(1): bicyclic nucleic acid (BNA)
  modified_base (2)..(2): bicyclic nucleic acid (BNA)
  modified_base (3)..(3): 5-methyl modified nucleotide
  modified_base (12)..(12): 5-methyl modified nucleotide
  modified_base (16)..(16): 5-methyl modified nucleotide
  modified_base (17)..(17): 5-methyl modified nucleotide
  modified_base (18)..(18): bicyclic nucleic acid (BNA)
  modified_base (19)..(19): bicyclic nucleic acid (BNA)
  source: /note="3' tri-ethylene glycol (TEG)"
gtcgguaaguucuguccaa

SEQ ID NO: 21537 - DNA, 18 bp, Artificial Sequence
  source: /note="Description of Artificial Sequence: Synthetic oligonucleotide"
  source: /note="Description of Combined DNA/RNA Molecule: Synthetic oligonucleotide"
  source: /note="DNA/RNA"
  modified_base (1)..(1): bicyclic nucleic acid (BNA)
  modified_base (2)..(2): bicyclic nucleic acid (BNA)
  modified_base (3)..(3): 5-methyl modified nucleotide
  modified_base (12)..(12): 5-methyl modified nucleotide
  modified_base (16)..(16): 5-methyl modified nucleotide
  modified_base (17)..(17): 5-methyl bicyclic nucleic acid
  modified_base (18)..(18): bicyclic nucleic acid (BNA)
  source: /note="3' tri-ethylene glycol (TEG)"
gtcgguaaguucugucca

SEQ ID NO: 21538 - DNA, 17 bp, Artificial Sequence
  source: /note="Description of Artificial Sequence: Synthetic oligonucleotide"
  source: /note="Description of Combined DNA/RNA Molecule: Synthetic oligonucleotide"
  source: /note="DNA/RNA"
  modified_base (1)..(1): bicyclic nucleic acid (BNA)
  modified_base (2)..(2): bicyclic nucleic acid (BNA)
  modified_base (3)..(3): 5-methyl modified nucleotide
  modified_base (12)..(12): 5-methyl modified nucleotide
  modified_base (16)..(16): 5-methyl bicyclic nucleic acid
  modified_base (17)..(17): 5-methyl bicyclic nucleic acid
  source: /note="3' tri-ethylene glycol (TEG)"
gtcgguaaguucugucc

SEQ ID NO: 21539 - DNA, 16 bp, Artificial Sequence
  source: /note="Description of Artificial Sequence: Synthetic oligonucleotide"
  source: /note="Description of Combined DNA/RNA Molecule: Synthetic oligonucleotide"
  source: /note="DNA/RNA"
  modified_base (1)..(1): bicyclic nucleic acid (BNA)
  modified_base (2)..(2): bicyclic nucleic acid (BNA)
  modified_base (3)..(3): 5-methyl modified nucleotide
  modified_base (12)..(12): 5-methyl modified nucleotide
  modified_base (15)..(15): bicyclic nucleic acid (BNA)
  modified_base (16)..(16): 5-methyl bicyclic nucleic acid
  source: /note="3' tri-ethylene glycol (TEG)"
gtcgguaaguucugtc

SEQ ID NO: 21540 - DNA, 15 bp, Artificial Sequence
  source: /note="Description of Artificial Sequence: Synthetic oligonucleotide"
  source: /note="Description of Combined DNA/RNA Molecule: Synthetic oligonucleotide"
  source: /note="DNA/RNA"
  modified_base (1)..(1): bicyclic nucleic acid (BNA)
  modified_base (2)..(2): bicyclic nucleic acid (BNA)
  modified_base (3)..(3): 5-methyl modified nucleotide
  modified_base (12)..(12): 5-methyl modified nucleotide
  modified_base (14)..(14): bicyclic nucleic acid (BNA)
  modified_base (15)..(15): bicyclic nucleic acid (BNA)
  source: /note="3' tri-ethylene glycol (TEG)"
gtcgguaaguucugt

SEQ ID NO: 21541 - DNA, 14 bp, Artificial Sequence
  source: /note="Description of Artificial Sequence: Synthetic oligonucleotide"
  source: /note="Description of Combined DNA/RNA Molecule: Synthetic oligonucleotide"
  source: /note="DNA/RNA"
  modified_base (1)..(1): bicyclic nucleic acid (BNA)
  modified_base (2)..(2): bicyclic nucleic acid (BNA)
  modified_base (3)..(3): 5-methyl modified nucleotide
  modified_base (12)..(12): 5-methyl modified nucleotide
  modified_base (13)..(13): bicyclic nucleic acid (BNA)
  modified_base (14)..(14): bicyclic nucleic acid (BNA)
  source: /note="3' tri-ethylene glycol (TEG)"
gtcgguaaguuctg

SEQ ID NO: 21542 - DNA, 13 bp, Artificial Sequence
  source: /note="Description of Artificial Sequence: Synthetic oligonucleotide"
  source: /note="Description of Combined DNA/RNA Molecule: Synthetic oligonucleotide"
  source: /note="DNA/RNA"
  modified_base (1)..(1): bicyclic nucleic acid (BNA)
  modified_base (2)..(2): bicyclic nucleic acid (BNA)
  modified_base (3)..(3): 5-methyl modified nucleotide
  modified_base (12)..(12): 5-methyl bicyclic nucleic acid
  modified_base (13)..(13): bicyclic nucleic acid (BNA)
  source: /note="3' tri-ethylene glycol (TEG)"
gtcgguaaguuct

SEQ ID NO: 21543 - DNA, 12 bp, Artificial Sequence
  source: /note="Description of Artificial Sequence: Synthetic oligonucleotide"
  source: /note="Description of Combined DNA/RNA Molecule: Synthetic oligonucleotide"
  source: /note="DNA/RNA"
  modified_base (1)..(1): bicyclic nucleic acid (BNA)
  modified_base (2)..(2): bicyclic nucleic acid (BNA)
  modified_base (3)..(3): 5-methyl modified nucleotide
  modified_base (11)..(11): bicyclic nucleic acid (BNA)
  modified_base (12)..(12): 5-methyl bicyclic nucleic acid
  source: /note="3' tri-ethylene glycol (TEG)"
gtcgguaagutc

SEQ ID NO: 21544 - DNA, 11 bp, Artificial Sequence
  source: /note="Description of Artificial Sequence: Synthetic oligonucleotide"
  source: /note="Description of Combined DNA/RNA Molecule: Synthetic oligonucleotide"
  source: /note="DNA/RNA"
  modified_base (1)..(1): bicyclic nucleic acid (BNA)
  modified_base (2)..(2): bicyclic nucleic acid (BNA)
  modified_base (3)..(3): 5-methyl modified nucleotide
  modified_base (10)..(10): bicyclic nucleic acid (BNA)
  modified_base (11)..(11): bicyclic nucleic acid (BNA)
  source: /note="3' tri-ethylene glycol (TEG)"
gtcgguaagtt

SEQ ID NO: 21545 - DNA, 10 bp, Artificial Sequence
  source: /note="Description of Artificial Sequence: Synthetic oligonucleotide"
  source: /note="Description of Combined DNA/RNA Molecule: Synthetic oligonucleotide"
  source: /note="DNA/RNA"
  modified_base (1)..(1): bicyclic nucleic acid (BNA)
  modified_base (2)..(2): bicyclic nucleic acid (BNA)
  modified_base (3)..(3): 5-methyl modified nucleotide
  modified_base (9)..(9): bicyclic nucleic acid (BNA)
  modified_base (10)..(10): bicyclic nucleic acid (BNA)
  source: /note="3' tri-ethylene glycol (TEG)"
gtcgguaagt

SEQ ID NO: 21546 - RNA, 20 nt, Artificial Sequence
  source: /note="Description of Artificial Sequence: Synthetic oligonucleotide"
  source: /note="RNA"
  modified_base (1)..(1): bicyclic nucleic acid (BNA)
  modified_base (2)..(2): bicyclic nucleic acid (BNA)
  modified_base (4)..(4): 5-methyl modified nucleotide
  modified_base (13)..(13): 5-methyl modified nucleotide
  modified_base (17)..(17): 5-methyl modified nucleotide
  modified_base (18)..(18): 5-methyl modified nucleotide
  modified_base (19)..(19): bicyclic nucleic acid (BNA)
  modified_base (20)..(20): bicyclic nucleic acid (BNA)
  source: /note="3' tri-ethylene glycol (TEG)"
agucgguaaguucuguccaa

SEQ ID NO: 21547 - RNA, 19 nt, Artificial Sequence
  source: /note="Description of Artificial Sequence: Synthetic oligonucleotide"
  source: /note="RNA"
  modified_base (1)..(1): bicyclic nucleic acid (BNA)
  modified_base (2)..(2): bicyclic nucleic acid (BNA)
  modified_base (4)..(4): 5-methyl modified nucleotide
  modified_base (13)..(13): 5-methyl modified nucleotide
  modified_base (17)..(17): 5-methyl modified nucleotide
  modified_base (18)..(18): 5-methyl bicyclic nucleic acid
  modified_base (19)..(19): bicyclic nucleic acid (BNA)
  source: /note="3' tri-ethylene glycol (TEG)"
agucgguaaguucugucca

SEQ ID NO: 21548 - DNA, 17 bp, Artificial Sequence
  source: /note="Description of Artificial Sequence: Synthetic oligonucleotide"
  source: /note="Description of Combined DNA/RNA Molecule: Synthetic oligonucleotide"
  source: /note="DNA/RNA"
  modified_base (1)..(1): bicyclic nucleic acid (BNA)
  modified_base (2)..(2): bicyclic nucleic acid (BNA)
  modified_base (4)..(4): 5-methyl modified nucleotide
  modified_base (13)..(13): 5-methyl modified nucleotide
  modified_base (16)..(16): bicyclic nucleic acid (BNA)
  modified_base (17)..(17): 5-methyl bicyclic nucleic acid
  source: /note="3' tri-ethylene glycol (TEG)"
agucgguaaguucugtc

SEQ ID NO: 21549 - DNA, 16 bp, Artificial Sequence
  source: /note="Description of Artificial Sequence: Synthetic oligonucleotide"
  source: /note="Description of Combined DNA/RNA Molecule: Synthetic oligonucleotide"
  source: /note="DNA/RNA"
  modified_base (1)..(1): bicyclic nucleic acid (BNA)
  modified_base (2)..(2): bicyclic nucleic acid (BNA)
  modified_base (4)..(4): 5-methyl modified nucleotide
  modified_base (13)..(13): 5-methyl modified nucleotide
  modified_base (15)..(15): bicyclic nucleic acid (BNA)
  modified_base (16)..(16): bicyclic nucleic acid (BNA)
  source: /note="3' tri-ethylene glycol (TEG)"
agucgguaaguucugt

SEQ ID NO: 21550 - DNA, 15 bp, Artificial Sequence
  source: /note="Description of Artificial Sequence: Synthetic oligonucleotide"
  source: /note="Description of Combined DNA/RNA Molecule: Synthetic oligonucleotide"
  source: /note="DNA/RNA"
  modified_base (1)..(1): bicyclic nucleic acid (BNA)
  modified_base (2)..(2): bicyclic nucleic acid (BNA)
  modified_base (4)..(4): 5-methyl modified nucleotide
  modified_base (13)..(13): 5-methyl modified nucleotide
  modified_base (14)..(14): bicyclic nucleic acid (BNA)
  modified_base (15)..(15): bicyclic nucleic acid (BNA)
  source: /note="3' tri-ethylene glycol (TEG)"
agucgguaaguuctg

SEQ ID NO: 21551 - DNA, 14 bp, Artificial Sequence
  source: /note="Description of Artificial Sequence: Synthetic oligonucleotide"
  source: /note="Description of Combined DNA/RNA Molecule: Synthetic oligonucleotide"
  source: /note="DNA/RNA"
  modified_base (1)..(1): bicyclic nucleic acid (BNA)
  modified_base (2)..(2): bicyclic nucleic acid (BNA)
  modified_base (4)..(4): 5-methyl modified nucleotide
  modified_base (13)..(13): 5-methyl bicyclic nucleic acid
  modified_base (14)..(14): bicyclic nucleic acid (BNA)
  source: /note="3' tri-ethylene glycol (TEG)"
agucgguaaguuct

SEQ ID NO: 21552 - DNA, 13 bp, Artificial Sequence
  source: /note="Description of Artificial Sequence: Synthetic oligonucleotide"
  source: /note="Description of Combined DNA/RNA Molecule: Synthetic oligonucleotide"
  source: /note="DNA/RNA"
  modified_base (1)..(1): bicyclic nucleic acid (BNA)
  modified_base (2)..(2): bicyclic nucleic acid (BNA)
  modified_base (4)..(4): 5-methyl modified nucleotide
  modified_base (12)..(12): bicyclic nucleic acid (BNA)
  modified_base (13)..(13): 5-methyl bicyclic nucleic acid
  source: /note="3' tri-ethylene glycol (TEG)"
agucgguaagutc

SEQ ID NO: 21553 - DNA, 12 bp, Artificial Sequence
  source: /note="Description of Artificial Sequence: Synthetic oligonucleotide"
  source: /note="Description of Combined DNA/RNA Molecule: Synthetic oligonucleotide"
  source: /note="DNA/RNA"
  modified_base (1)..(1): bicyclic nucleic acid (BNA)
  modified_base (2)..(2): bicyclic nucleic acid (BNA)
  modified_base (4)..(4): 5-methyl modified nucleotide
  modified_base (11)..(11): bicyclic nucleic acid (BNA)
  modified_base (12)..(12): bicyclic nucleic acid (BNA)
  source: /note="3' tri-ethylene glycol (TEG)"
agucgguaagtt

SEQ ID NO: 21554 - DNA, 11 bp, Artificial Sequence
  source: /note="Description of Artificial Sequence: Synthetic oligonucleotide"
  source: /note="Description of Combined DNA/RNA Molecule: Synthetic oligonucleotide"
  source: /note="DNA/RNA"
  modified_base (1)..(1): bicyclic nucleic acid (BNA)
  modified_base (2)..(2): bicyclic nucleic acid (BNA)
  modified_base (4)..(4): 5-methyl modified nucleotide
  modified_base (10)..(10): bicyclic nucleic acid (BNA)
  modified_base (11)..(11): bicyclic nucleic acid (BNA)
  source: /note="3' tri-ethylene glycol (TEG)"
agucgguaagt

SEQ ID NO: 21555 - RNA, 20 nt, Artificial Sequence
  source: /note="Description of Artificial Sequence: Synthetic oligonucleotide"
  source: /note="RNA"
  modified_base (1)..(1): 5-methyl bicyclic nucleic acid
  modified_base (2)..(2): bicyclic nucleic acid (BNA)
  modified_base (5)..(5): 5-methyl modified nucleotide
  modified_base (14)..(14): 5-methyl modified nucleotide
  modified_base (18)..(18): 5-methyl modified nucleotide
  modified_base (19)..(19): 5-methyl bicyclic nucleic acid
  modified_base (20)..(20): bicyclic nucleic acid (BNA)
  source: /note="3' tri-ethylene glycol (TEG)"
cagucgguaaguucugucca

SEQ ID NO: 21556 - RNA, 19 nt, Artificial Sequence
  source: /note="Description of Artificial Sequence: Synthetic oligonucleotide"
  source: /note="RNA"
  modified_base (1)..(1): 5-methyl bicyclic nucleic acid
  modified_base (2)..(2): bicyclic nucleic acid (BNA)
  modified_base (5)..(5): 5-methyl modified nucleotide
  modified_base (14)..(14): 5-methyl modified nucleotide
  modified_base (18)..(18): 5-methyl bicyclic nucleic acid
  modified_base (19)..(19): 5-methyl bicyclic nucleic acid
  source: /note="3' tri-ethylene glycol (TEG)"
cagucgguaaguucugucc

SEQ ID NO: 21557 - DNA, 18 bp, Artificial Sequence
  source: /note="Description of Artificial Sequence: Synthetic oligonucleotide"
  source: /note="Description of Combined DNA/RNA Molecule: Synthetic oligonucleotide"
  source: /note="DNA/RNA"
  modified_base (1)..(1): 5-methyl bicyclic nucleic acid
  modified_base (2)..(2): bicyclic nucleic acid (BNA)
  modified_base (5)..(5): 5-methyl modified nucleotide
  modified_base (14)..(14): 5-methyl modified nucleotide
  modified_base (17)..(17): bicyclic nucleic acid (BNA)
  modified_base (18)..(18): 5-methyl bicyclic nucleic acid
  source: /note="3' tri-ethylene glycol (TEG)"
cagucgguaaguucugtc

SEQ ID NO: 21558 - DNA, 17 bp, Artificial Sequence
  source: /note="Description of Artificial Sequence: Synthetic oligonucleotide"
  source: /note="Description of Combined DNA/RNA Molecule: Synthetic oligonucleotide"
  source: /note="DNA/RNA"
  modified_base (1)..(1): 5-methyl bicyclic nucleic acid
  modified_base (2)..(2): bicyclic nucleic acid (BNA)
  modified_base (5)..(5): 5-methyl modified nucleotide
  modified_base (14)..(14): 5-methyl modified nucleotide
  modified_base (16)..(16): bicyclic nucleic acid (BNA)
  modified_base (17)..(17): bicyclic nucleic acid (BNA)
  source: /note="3' tri-ethylene glycol (TEG)"
cagucgguaaguucugt

SEQ ID NO: 21559 - DNA, 16 bp, Artificial Sequence
  source: /note="Description of Artificial Sequence: Synthetic oligonucleotide"
  source: /note="Description of Combined DNA/RNA Molecule: Synthetic oligonucleotide"
  source: /note="DNA/RNA"
  modified_base (1)..(1): 5-methyl bicyclic nucleic acid
  modified_base (2)..(2): bicyclic nucleic acid (BNA)
  modified_base (5)..(5): 5-methyl modified nucleotide
  modified_base (14)..(14): 5-methyl modified nucleotide
  modified_base (15)..(15): bicyclic nucleic acid (BNA)
  modified_base (16)..(16): bicyclic nucleic acid (BNA)
  source: /note="3' tri-ethylene glycol (TEG)"
cagucgguaaguuctg

SEQ ID NO: 21560 - DNA, 15 bp, Artificial Sequence
  source: /note="Description of Artificial Sequence: Synthetic oligonucleotide"
  source: /note="Description of Combined DNA/RNA Molecule: Synthetic oligonucleotide"
  source: /note="DNA/RNA"
  modified_base (1)..(1): 5-methyl bicyclic nucleic acid
  modified_base (2)..(2): bicyclic nucleic acid (BNA)
  modified_base (5)..(5): 5-methyl modified nucleotide
  modified_base (14)..(14): 5-methyl bicyclic nucleic acid
  modified_base (15)..(15): bicyclic nucleic acid (BNA)
  source: /note="3' tri-ethylene glycol (TEG)"
cagucgguaaguuct

SEQ ID NO: 21561 - DNA, 14 bp, Artificial Sequence
  source: /note="Description of Artificial Sequence: Synthetic oligonucleotide"
  source: /note="Description of Combined DNA/RNA Molecule: Synthetic oligonucleotide"
  source: /note="DNA/RNA"
  modified_base (1)..(1): 5-methyl bicyclic nucleic acid
  modified_base (2)..(2): bicyclic nucleic acid (BNA)
  modified_base (5)..(5): 5-methyl modified nucleotide
  modified_base (13)..(13): bicyclic nucleic acid (BNA)
  modified_base (14)..(14): 5-methyl bicyclic nucleic acid
  source: /note="3' tri-ethylene glycol (TEG)"
cagucgguaagutc

SEQ ID NO: 21562 - DNA, 13 bp, Artificial Sequence
  source: /note="Description of Artificial Sequence: Synthetic oligonucleotide"
  source: /note="Description of Combined DNA/RNA Molecule: Synthetic oligonucleotide"
  source: /note="DNA/RNA"
  modified_base (1)..(1): 5-methyl bicyclic nucleic acid
  modified_base (2)..(2): bicyclic nucleic acid (BNA)
  modified_base (5)..(5): 5-methyl modified nucleotide
  modified_base (12)..(12): bicyclic nucleic acid (BNA)
  modified_base (13)..(13): bicyclic nucleic acid (BNA)
  source: /note="3' tri-ethylene glycol (TEG)"
cagucgguaagtt

SEQ ID NO: 21563 - DNA, 12 bp, Artificial Sequence
  source: /note="Description of Artificial Sequence: Synthetic oligonucleotide"
  source: /note="Description of Combined DNA/RNA Molecule: Synthetic oligonucleotide"
  source: /note="DNA/RNA"
  modified_base (1)..(1): 5-methyl bicyclic nucleic acid
  modified_base (2)..(2): bicyclic nucleic acid (BNA)
  modified_base (5)..(5): 5-methyl modified nucleotide
  modified_base (11)..(11): bicyclic nucleic acid (BNA)
  modified_base (12)..(12): bicyclic nucleic acid (BNA)
  source: /note="3' tri-ethylene glycol (TEG)"
cagucgguaagt

SEQ ID NO: 21564 - RNA, 20 nt, Artificial Sequence
  source: /note="Description of Artificial Sequence: Synthetic oligonucleotide"
  source: /note="RNA"
  modified_base (1)..(1): 5-methyl bicyclic nucleic acid
  modified_base (2)..(2): 5-methyl bicyclic nucleic acid
  modified_base (6)..(6): 5-methyl modified nucleotide
  modified_base (15)..(15): 5-methyl modified nucleotide
  modified_base (19)..(19): 5-methyl bicyclic nucleic acid
  modified_base (20)..(20): 5-methyl bicyclic nucleic acid
  source: /note="3' tri-ethylene glycol (TEG)"
ccagucgguaaguucugucc

SEQ ID NO: 21565 - DNA, 19 bp, Artificial Sequence
  source: /note="Description of Artificial Sequence: Synthetic oligonucleotide"
  source: /note="Description of Combined DNA/RNA Molecule: Synthetic oligonucleotide"
  source: /note="DNA/RNA"
  modified_base (1)..(1): 5-methyl bicyclic nucleic acid
  modified_base (2)..(2): 5-methyl bicyclic nucleic acid
  modified_base (6)..(6): 5-methyl modified nucleotide
  modified_base (15)..(15): 5-methyl modified nucleotide
  modified_base (18)..(18): bicyclic nucleic acid (BNA)
  modified_base (19)..(19): 5-methyl bicyclic nucleic acid
  source: /note="3' tri-ethylene glycol (TEG)"
ccagucgguaaguucugtc

SEQ ID NO: 21566 - DNA, 18 bp, Artificial Sequence
  source: /note="Description of Artificial Sequence: Synthetic oligonucleotide"
  source: /note="Description of Combined DNA/RNA Molecule: Synthetic oligonucleotide"
  source: /note="DNA/RNA"
  modified_base (1)..(1): 5-methyl bicyclic nucleic acid
  modified_base (2)..(2): 5-methyl bicyclic nucleic acid
  modified_base (6)..(6): 5-methyl modified nucleotide
  modified_base (15)..(15): 5-methyl modified nucleotide
  modified_base (17)..(17): bicyclic nucleic acid (BNA)
  modified_base (18)..(18): bicyclic nucleic acid (BNA)
  source: /note="3' tri-ethylene glycol (TEG)"
ccagucgguaaguucugt

SEQ ID NO: 21567 - DNA, 17 bp, Artificial Sequence
  source: /note="Description of Artificial Sequence: Synthetic oligonucleotide"
  source: /note="Description of Combined DNA/RNA Molecule: Synthetic oligonucleotide"
  source: /note="DNA/RNA"
  modified_base (1)..(1): 5-methyl bicyclic nucleic acid
  modified_base (2)..(2): 5-methyl bicyclic nucleic acid
  modified_base (6)..(6): 5-methyl modified nucleotide
  modified_base (15)..(15): 5-methyl modified nucleotide
  modified_base (16)..(16): bicyclic nucleic acid (BNA)
  modified_base (17)..(17): bicyclic nucleic acid (BNA)
  source: /note="3' tri-ethylene glycol (TEG)"
ccagucgguaaguuctg

SEQ ID NO: 21568 - DNA, 16 bp, Artificial Sequence
  source: /note="Description of Artificial Sequence: Synthetic oligonucleotide"
  source: /note="Description of Combined DNA/RNA Molecule: Synthetic oligonucleotide"
  source: /note="DNA/RNA"
  modified_base (1)..(1): 5-methyl bicyclic nucleic acid
  modified_base (2)..(2): 5-methyl bicyclic nucleic acid
  modified_base (6)..(6): 5-methyl modified nucleotide
  modified_base (15)..(15): 5-methyl bicyclic nucleic acid
  modified_base (16)..(16): bicyclic nucleic acid (BNA)
  source: /note="3' tri-ethylene glycol (TEG)"
ccagucgguaaguuct

SEQ ID NO: 21569 - DNA, 15 bp, Artificial Sequence
  source: /note="Description of Artificial Sequence: Synthetic oligonucleotide"
  source: /note="Description of Combined DNA/RNA Molecule: Synthetic oligonucleotide"
  source: /note="DNA/RNA"
  modified_base (1)..(1): 5-methyl bicyclic nucleic acid
  modified_base (2)..(2): 5-methyl bicyclic nucleic acid
  modified_base (6)..(6): 5-methyl modified nucleotide
  modified_base (14)..(14): bicyclic nucleic acid (BNA)
  modified_base (15)..(15): 5-methyl bicyclic nucleic acid
  source: /note="3' tri-ethylene glycol (TEG)"
ccagucgguaagutc

SEQ ID NO: 21570 - DNA, 14 bp, Artificial Sequence
  source: /note="Description of Artificial Sequence: Synthetic oligonucleotide"
  source: /note="Description of Combined DNA/RNA Molecule: Synthetic oligonucleotide"
  source: /note="DNA/RNA"
  modified_base (1)..(1): 5-methyl bicyclic nucleic acid
  modified_base (2)..(2): 5-methyl bicyclic nucleic acid
  modified_base (6)..(6): 5-methyl modified nucleotide
  modified_base (13)..(13): bicyclic nucleic acid (BNA)
  modified_base (14)..(14): bicyclic nucleic acid (BNA)
  source: /note="3' tri-ethylene glycol (TEG)"
ccagucgguaagtt

SEQ ID NO: 21571 - DNA, 13 bp, Artificial Sequence
  source: /note="Description of Artificial Sequence: Synthetic oligonucleotide"
  source: /note="Description of Combined DNA/RNA Molecule: Synthetic oligonucleotide"
  source: /note="DNA/RNA"
  modified_base (1)..(1): 5-methyl bicyclic nucleic acid
  modified_base (2)..(2): 5-methyl bicyclic nucleic acid
  modified_base (6)..(6): 5-methyl modified nucleotide
  modified_base (12)..(12): bicyclic nucleic acid (BNA)
  modified_base (13)..(13): bicyclic nucleic acid (BNA)
  source: /note="3' tri-ethylene glycol (TEG)"
ccagucgguaagt

SEQ ID NO: 21572 - DNA, 20 bp, Artificial Sequence
  source: /note="Description of Artificial Sequence: Synthetic oligonucleotide"
  source: /note="Description of Combined DNA/RNA Molecule: Synthetic oligonucleotide"
  source: /note="DNA/RNA"
  modified_base (1)..(1): bicyclic nucleic acid (BNA)
  modified_base (2)..(2): 5-methyl bicyclic nucleic acid
  modified_base (3)..(3): 5-methyl modified nucleotide
  modified_base (7)..(7): 5-methyl modified nucleotide
  modified_base (16)..(16): 5-methyl modified nucleotide
  modified_base (19)..(19): bicyclic nucleic acid (BNA)
  modified_base (20)..(20): 5-methyl bicyclic nucleic acid
  source: /note="3' tri-ethylene glycol (TEG)"
gccagucgguaaguucugtc

SEQ ID NO: 21573 - DNA, 19 bp, Artificial Sequence
  source: /note="Description of Artificial Sequence: Synthetic oligonucleotide"
  source: /note="Description of Combined DNA/RNA Molecule: Synthetic oligonucleotide"
  source: /note="DNA/RNA"
  modified_base (1)..(1): bicyclic nucleic acid (BNA)
  modified_base (2)..(2): 5-methyl bicyclic nucleic acid
  modified_base (3)..(3): 5-methyl modified nucleotide
  modified_base (7)..(7): 5-methyl modified nucleotide
  modified_base (16)..(16): 5-methyl modified nucleotide
  modified_base (18)..(18): bicyclic nucleic acid (BNA)
  modified_base (19)..(19): bicyclic nucleic acid (BNA)
  source: /note="3' tri-ethylene glycol (TEG)"
gccagucgguaaguucugt

SEQ ID NO: 21574 - DNA, 18 bp, Artificial Sequence
  source: /note="Description of Artificial Sequence: Synthetic oligonucleotide"
  source: /note="Description of Combined DNA/RNA Molecule: Synthetic oligonucleotide"
  source: /note="DNA/RNA"
  modified_base (1)..(1): bicyclic nucleic acid (BNA)
  modified_base (2)..(2): 5-methyl bicyclic nucleic acid
  modified_base (3)..(3): 5-methyl modified nucleotide
  modified_base (7)..(7): 5-methyl modified nucleotide
  modified_base (16)..(16): 5-methyl modified nucleotide
  modified_base (17)..(17): bicyclic nucleic acid (BNA)
  modified_base (18)..(18): bicyclic nucleic acid (BNA)
  source: /note="3' tri-ethylene glycol (TEG)"
gccagucgguaaguuctg

SEQ ID NO: 21575 - DNA, 17 bp, Artificial Sequence
  source: /note="Description of Artificial Sequence: Synthetic oligonucleotide"
  source: /note="Description of Combined DNA/RNA Molecule: Synthetic oligonucleotide"
  source: /note="DNA/RNA"
  modified_base (1)..(1): bicyclic nucleic acid (BNA)
  modified_base (2)..(2): 5-methyl bicyclic nucleic acid
  modified_base (3)..(3): 5-methyl modified nucleotide
  modified_base (7)..(7): 5-methyl modified nucleotide
  modified_base (16)..(16): 5-methyl bicyclic nucleic acid
  modified_base (17)..(17): bicyclic nucleic acid (BNA)
  source: /note="3' tri-ethylene glycol (TEG)"
gccagucgguaaguuct

SEQ ID NO: 21576 - DNA, 16 bp, Artificial Sequence
  source: /note="Description of Artificial Sequence: Synthetic oligonucleotide"
  source: /note="Description of Combined DNA/RNA Molecule: Synthetic oligonucleotide"
  source: /note="DNA/RNA"
  modified_base (1)..(1): bicyclic nucleic acid (BNA)
  modified_base (2)..(2): 5-methyl bicyclic nucleic acid
  modified_base (3)..(3): 5-methyl modified nucleotide
  modified_base (7)..(7): 5-methyl modified nucleotide
  modified_base (15)..(15): bicyclic nucleic acid (BNA)
  modified_base (16)..(16): 5-methyl bicyclic nucleic acid
  source: /note="3' tri-ethylene glycol (TEG)"
gccagucgguaagutc

SEQ ID NO: 21577 - DNA, 15 bp, Artificial Sequence
  source: /note="Description of Artificial Sequence: Synthetic oligonucleotide"
  source: /note="Description of Combined DNA/RNA Molecule: Synthetic oligonucleotide"
  source: /note="DNA/RNA"
  modified_base (1)..(1): bicyclic nucleic acid (BNA)
  modified_base (2)..(2): 5-methyl bicyclic nucleic acid
  modified_base (3)..(3): 5-methyl modified nucleotide
  modified_base (7)..(7): 5-methyl modified nucleotide
  modified_base (14)..(14): bicyclic nucleic acid (BNA)
  modified_base (15)..(15): bicyclic nucleic acid (BNA)
  source: /note="3' tri-ethylene glycol (TEG)"
gccagucgguaagtt

SEQ ID NO: 21578 - DNA, 14 bp, Artificial Sequence
  source: /note="Description of Artificial Sequence: Synthetic oligonucleotide"
  source: /note="Description of Combined DNA/RNA Molecule: Synthetic oligonucleotide"
  source: /note="DNA/RNA"
  modified_base (1)..(1): bicyclic nucleic acid (BNA)
  modified_base (2)..(2): 5-methyl bicyclic nucleic acid
  modified_base (3)..(3): 5-methyl modified nucleotide
  modified_base (7)..(7): 5-methyl modified nucleotide
  modified_base (13)..(13): bicyclic nucleic acid (BNA)
  modified_base (14)..(14): bicyclic nucleic acid (BNA)
  source: /note="3' tri-ethylene glycol (TEG)"
gccagucgguaagt

SEQ ID NO: 21579 - DNA, 20 bp, Artificial Sequence
  source: /note="Description of Artificial Sequence: Synthetic oligonucleotide"
  source: /note="Description of Combined DNA/RNA Molecule: Synthetic oligonucleotide"
  source: /note="DNA/RNA"
  modified_base (1)..(1): bicyclic nucleic acid (BNA)
  modified_base (2)..(2): 5-methyl bicyclic nucleic acid
  modified_base (14)..(14): 5-methyl modified nucleotide
  modified_base (19)..(19): 5-methyl bicyclic nucleic acid
  modified_base (20)..(20): bicyclic nucleic acid (BNA)
  source: /note="3' tri-ethylene glycol (TEG)"
tcaaggaagauggcauuuct

SEQ ID NO: 21580 - DNA, 22 bp, Artificial Sequence
  source: /note="Description of Artificial Sequence: Synthetic oligonucleotide"
  source: /note="Description of Combined DNA/RNA Molecule: Synthetic oligonucleotide"
  source: /note="DNA/RNA"
  modified_base (1)..(1): bicyclic nucleic acid (BNA)
  modified_base (2)..(2): 5-methyl bicyclic nucleic acid
  modified_base (14)..(14): 5-methyl modified nucleotide
  modified_base (19)..(19): 5-methyl modified nucleotide
  modified_base (21)..(21): bicyclic nucleic acid (BNA)
  modified_base (22)..(22): bicyclic nucleic acid (BNA)
  source: /note="3' tri-ethylene glycol (TEG)"
tcaaggaagauggcauuucuag

SEQ ID NO: 21581 - DNA, 16 bp, Artificial Sequence
  source: /note="Description of Artificial Sequence: Synthetic oligonucleotide"
  source: /note="Description of Combined DNA/RNA Molecule: Synthetic oligonucleotide"
  source: /note="DNA/RNA"
  modified_base (1)..(1): bicyclic nucleic acid (BNA)
  modified_base (2)..(2): 5-methyl bicyclic nucleic acid
  modified_base (14)..(14): 5-methyl modified nucleotide
  modified_base (15)..(15): bicyclic nucleic acid (BNA)
  modified_base (16)..(16): bicyclic nucleic acid (BNA)
  source: /note="3' tri-ethylene glycol (TEG)"
tcaaggaagauggcat

SEQ ID NO: 21582 - DNA, 15 bp, Artificial Sequence
  source: /note="Description of Artificial Sequence: Synthetic oligonucleotide"
  source: /note="Description of Combined DNA/RNA Molecule: Synthetic oligonucleotide"
  source: /note="DNA/RNA"
  modified_base (1)..(1): bicyclic nucleic acid (BNA)
  modified_base (2)..(2): bicyclic nucleic acid (BNA)
  modified_base (9)..(9): 5-methyl modified nucleotide
  modified_base (14)..(14): 5-methyl bicyclic nucleic acid
  modified_base (15)..(15): bicyclic nucleic acid (BNA)
  source: /note="3' tri-ethylene glycol (TEG)"
gaagauggcauuuct

SEQ ID NO: 21583 - DNA, 21 bp, Artificial Sequence
  source: /note="Description of Artificial Sequence: Synthetic oligonucleotide"
  source: /note="Description of Combined DNA/RNA Molecule: Synthetic oligonucleotide"
  source: /note="DNA/RNA"
  modified_base (1)..(1): bicyclic nucleic acid (BNA)
  modified_base (2)..(2): 5-methyl bicyclic nucleic acid
  modified_base (14)..(14): 5-methyl modified nucleotide
  modified_base (19)..(19): 5-methyl modified nucleotide
  modified_base (20)..(20): bicyclic nucleic acid (BNA)
  modified_base (21)..(21): bicyclic nucleic acid (BNA)
  source: /note="3' tri-ethylene glycol (TEG)"
tcaaggaagauggcauuucta

SEQ ID NO: 21584 - DNA, 19 bp, Artificial Sequence
  source: /note="Description of Artificial Sequence: Synthetic oligonucleotide"
  source: /note="Description of Combined DNA/RNA Molecule: Synthetic oligonucleotide"
  source: /note="DNA/RNA"
  modified_base (1)..(1): bicyclic nucleic acid (BNA)
  modified_base (2)..(2): 5-methyl bicyclic nucleic acid
  modified_base (14)..(14): 5-methyl modified nucleotide
  modified_base (18)..(18): bicyclic nucleic acid (BNA)
  modified_base (19)..(19): 5-methyl bicyclic nucleic acid
  source: /note="3' tri-ethylene glycol (TEG)"
tcaaggaagauggcauutc

SEQ ID NO: 21585 - DNA, 18 bp, Artificial Sequence
  source: /note="Description of Artificial Sequence: Synthetic oligonucleotide"
  source: /note="Description of Combined DNA/RNA Molecule: Synthetic oligonucleotide"
  source: /note="DNA/RNA"
  modified_base (1)..(1): bicyclic nucleic acid (BNA)
  modified_base (2)..(2): 5-methyl bicyclic nucleic acid
  modified_base (14)..(14): 5-methyl modified nucleotide
  modified_base (17)..(17): bicyclic nucleic acid (BNA)
  modified_base (18)..(18): bicyclic nucleic acid (BNA)
  source: /note="3' tri-ethylene glycol (TEG)"
tcaaggaagauggcautt

SEQ ID NO: 21586 - DNA, 17 bp, Artificial Sequence
  source: /note="Description of Artificial Sequence: Synthetic oligonucleotide"
  source: /note="Description of Combined DNA/RNA Molecule: Synthetic oligonucleotide"
  source: /note="DNA/RNA"
  modified_base (1)..(1): bicyclic nucleic acid (BNA)
  modified_base (2)..(2): 5-methyl bicyclic nucleic acid
  modified_base (14)..(14): 5-methyl modified nucleotide
  modified_base (16)..(16): bicyclic nucleic acid (BNA)
  modified_base (17)..(17): bicyclic nucleic acid (BNA)
  source: /note="3' tri-ethylene glycol (TEG)"
tcaaggaagauggcatt

SEQ ID NO: 21587 - DNA, 15 bp, Artificial Sequence
  source: /note="Description of Artificial Sequence: Synthetic oligonucleotide"
  source: /note="Description of Combined DNA/RNA Molecule: Synthetic oligonucleotide"
  source: /note="DNA/RNA"
  modified_base (1)..(1): bicyclic nucleic acid (BNA)
  modified_base (2)..(2): 5-methyl bicyclic nucleic acid
  modified_base (14)..(14): 5-methyl bicyclic nucleic acid
  modified_base (15)..(15): bicyclic nucleic acid (BNA)
  source: /note="3' tri-ethylene glycol (TEG)"
tcaaggaagauggca

SEQ ID NO: 21588 - DNA, 14 bp, Artificial Sequence
  source: /note="Description of Artificial Sequence: Synthetic oligonucleotide"
  source: /note="Description of Combined DNA/RNA Molecule: Synthetic oligonucleotide"
  source: /note="DNA/RNA"
  modified_base (1)..(1): bicyclic nucleic acid (BNA)
  modified_base (2)..(2): 5-methyl bicyclic nucleic acid
  modified_base (13)..(13): bicyclic nucleic acid (BNA)
  modified_base (14)..(14): 5-methyl bicyclic nucleic acid
  source: /note="3' tri-ethylene glycol (TEG)"
tcaaggaagauggc

SEQ ID NO: 21589 - DNA, 13 bp, Artificial Sequence
  source: /note="Description of Artificial Sequence: Synthetic oligonucleotide"
  source: /note="Description of Combined DNA/RNA Molecule: Synthetic oligonucleotide"
  source: /note="DNA/RNA"
  modified_base (1)..(1): bicyclic nucleic acid (BNA)
  modified_base (2)..(2): 5-methyl bicyclic nucleic acid
  modified_base (12)..(12): bicyclic nucleic acid (BNA)
  modified_base (13)..(13): bicyclic nucleic acid (BNA)
  source: /note="3' tri-ethylene glycol (TEG)"
tcaaggaagaugg

SEQ ID NO: 21590 - DNA, 12 bp, Artificial Sequence
  source: /note="Description of Artificial Sequence: Synthetic oligonucleotide"
  source: /note="DNA/RNA"
  modified_base (1)..(1): bicyclic nucleic acid (BNA)
  modified_base (2)..(2): 5-methyl bicyclic nucleic acid
  modified_base (11)..(11): bicyclic nucleic acid (BNA)
  modified_base (12)..(12): bicyclic nucleic acid (BNA)
  source: /note="3' tri-ethylene glycol (TEG)"
tcaaggaagatg

SEQ ID NO: 21591 - DNA, 11 bp, Artificial Sequence
  source: /note="Description of Artificial Sequence: Synthetic oligonucleotide"
  source: /note="DNA/RNA"
  modified_base (1)..(1): bicyclic nucleic acid (BNA)
  modified_base (2)..(2): 5-methyl bicyclic nucleic acid
  modified_base (10)..(10): bicyclic nucleic acid (BNA)
  modified_base (11)..(11): bicyclic nucleic acid (BNA)
  source: /note="3' tri-ethylene glycol (TEG)"
tcaaggaagat

SEQ ID NO: 21592 - DNA, 10 bp, Artificial Sequence
  source: /note="Description of Artificial Sequence: Synthetic oligonucleotide"
  source: /note="DNA/RNA"
  modified_base (1)..(1): bicyclic nucleic acid (BNA)
  modified_base (2)..(2): 5-methyl bicyclic nucleic acid
  modified_base (9)..(9): bicyclic nucleic acid (BNA)
  modified_base (10)..(10): bicyclic nucleic acid (BNA)
  source: /note="3' tri-ethylene glycol (TEG)"
tcaaggaaga

SEQ ID NO: 21593 - DNA, 9 bp, Artificial Sequence
  source: /note="Description of Artificial Sequence: Synthetic oligonucleotide"
  source: /note="DNA/RNA"
  modified_base (1)..(1): bicyclic nucleic acid (BNA)
  modified_base (2)..(2): 5-methyl bicyclic nucleic acid
  modified_base (8)..(8): bicyclic nucleic acid (BNA)
  modified_base (9)..(9): bicyclic nucleic acid (BNA)
  source: /note="3' tri-ethylene glycol (TEG)"
tcaaggaag

SEQ ID NO: 21594 - RNA, 21 nt, Artificial Sequence
  source: /note="Description of Artificial Sequence: Synthetic oligonucleotide"
  source: /note="RNA"
  modified_base (1)..(1): 5-methyl bicyclic nucleic acid
  modified_base (2)..(2): bicyclic nucleic acid (BNA)
  modified_base (13)..(13): 5-methyl modified nucleotide
  modified_base (18)..(18): 5-methyl modified nucleotide
  modified_base (20)..(20): bicyclic nucleic acid (BNA)
  modified_base (21)..(21): bicyclic nucleic acid (BNA)
  source: /note="3' tri-ethylene glycol (TEG)"
caaggaagauggcauuucuag

SEQ ID NO: 21595 - DNA, 20 bp, Artificial Sequence
  source: /note="Description of Artificial Sequence: Synthetic oligonucleotide"
  source: /note="Description of Combined DNA/RNA Molecule: Synthetic oligonucleotide"
  source: /note="DNA/RNA"
  modified_base (1)..(1): 5-methyl bicyclic nucleic acid
  modified_base (2)..(2): bicyclic nucleic acid (BNA)
  modified_base (13)..(13): 5-methyl modified nucleotide
  modified_base (18)..(18): 5-methyl modified nucleotide
  modified_base (19)..(19): bicyclic nucleic acid (BNA)
  modified_base (20)..(20): bicyclic nucleic acid (BNA)
  source: /note="3' tri-ethylene glycol (TEG)"
caaggaagauggcauuucta

SEQ ID NO: 21596 - DNA, 19 bp, Artificial Sequence
  source: /note="Description of Artificial Sequence: Synthetic oligonucleotide"
  source: /note="Description of Combined DNA/RNA Molecule: Synthetic oligonucleotide"
  source: /note="DNA/RNA"
  modified_base (1)..(1): 5-methyl bicyclic nucleic acid
  modified_base (2)..(2): bicyclic nucleic acid (BNA)
  modified_base (13)..(13): 5-methyl modified nucleotide
  modified_base (18)..(18): 5-methyl bicyclic nucleic acid
  modified_base (19)..(19): bicyclic nucleic acid (BNA)
  source: /note="3' tri-ethylene glycol (TEG)"
caaggaagauggcauuuct

SEQ ID NO: 21597 - DNA, 18 bp, Artificial Sequence
  source: /note="Description of Artificial Sequence: Synthetic oligonucleotide"
  source: /note="Description of Combined DNA/RNA Molecule: Synthetic oligonucleotide"
  source: /note="DNA/RNA"
  modified_base (1)..(1): 5-methyl bicyclic nucleic acid
  modified_base (2)..(2): bicyclic nucleic acid (BNA)
  modified_base (13)..(13): 5-methyl modified nucleotide
  modified_base (17)..(17): bicyclic nucleic acid (BNA)
  modified_base (18)..(18): 5-methyl bicyclic nucleic acid
  source: /note="3' tri-ethylene glycol (TEG)"
caaggaagauggcauutc

SEQ ID NO: 21598 - DNA, 17 bp, Artificial Sequence
  source: /note="Description of Artificial Sequence: Synthetic oligonucleotide"
  source: /note="Description of Combined DNA/RNA Molecule: Synthetic oligonucleotide"
  source: /note="DNA/RNA"
  modified_base (1)..(1): 5-methyl bicyclic nucleic acid
  modified_base (2)..(2): bicyclic nucleic acid (BNA)
  modified_base (13)..(13): 5-methyl modified nucleotide
  modified_base (16)..(16): bicyclic nucleic acid (BNA)
  modified_base (17)..(17): bicyclic nucleic acid (BNA)
  source: /note="3' tri-ethylene glycol (TEG)"
caaggaagauggcautt

SEQ ID NO: 21599 - DNA, 16 bp, Artificial Sequence
  source: /note="Description of Artificial Sequence: Synthetic oligonucleotide"
  source: /note="Description of Combined DNA/RNA Molecule: Synthetic oligonucleotide"
  source: /note="DNA/RNA"
  modified_base (1)..(1): 5-methyl bicyclic nucleic acid
  modified_base (2)..(2): bicyclic nucleic acid (BNA)
  modified_base (13)..(13): 5-methyl modified nucleotide
  modified_base (15)..(15): bicyclic nucleic acid (BNA)
  modified_base (16)..(16): bicyclic nucleic acid (BNA)
  source: /note="3' tri-ethylene glycol (TEG)"
caaggaagauggcatt

SEQ ID NO: 21600 - DNA, 15 bp, Artificial Sequence
  source: /note="Description of Artificial Sequence: Synthetic oligonucleotide"
  source: /note="Description of Combined DNA/RNA Molecule: Synthetic oligonucleotide"
  source: /note="DNA/RNA"
  modified_base (1)..(1): 5-methyl bicyclic nucleic acid
  modified_base (2)..(2): bicyclic nucleic acid (BNA)
  modified_base (13)..(13): 5-methyl modified nucleotide
  modified_base (14)..(14): bicyclic nucleic acid (BNA)
  modified_base (15)..(15): bicyclic nucleic acid (BNA)
  source: /note="3' tri-ethylene glycol (TEG)"
caaggaagauggcat

SEQ ID NO: 21601 - RNA, 14 nt, Artificial Sequence
  source: /note="Description of Artificial Sequence: Synthetic oligonucleotide"
  source: /note="RNA"
  modified_base (1)..(1): 5-methyl bicyclic nucleic acid
  modified_base (2)..(2): bicyclic nucleic acid (BNA)
  modified_base (13)..(13): 5-methyl bicyclic nucleic acid
  modified_base (14)..(14): bicyclic nucleic acid (BNA)
  source: /note="3' tri-ethylene glycol (TEG)"
caaggaagauggca

SEQ ID NO: 21602 - RNA, 13 nt, Artificial Sequence
  source: /note="Description of Artificial Sequence: Synthetic oligonucleotide"
  source: /note="RNA"
  modified_base (1)..(1): 5-methyl bicyclic nucleic acid
  modified_base (2)..(2): bicyclic nucleic acid (BNA)
  modified_base (12)..(12): bicyclic nucleic acid (BNA)
  modified_base (13)..(13): 5-methyl bicyclic nucleic acid
  source: /note="3' tri-ethylene glycol (TEG)"
caaggaagauggc

SEQ ID NO: 21603 - RNA, 12 nt, Artificial Sequence
  source: /note="Description of Artificial Sequence: Synthetic oligonucleotide"
  source: /note="RNA"
  modified_base (1)..(1): 5-methyl bicyclic nucleic acid
  modified_base (2)..(2): bicyclic nucleic acid (BNA)
  modified_base (11)..(11): bicyclic nucleic acid (BNA)
  modified_base (12)..(12): bicyclic nucleic acid (BNA)
  source: /note="3' tri-ethylene glycol (TEG)"
caaggaagaugg

SEQ ID NO: 21604 - DNA, 11 bp, Artificial Sequence
  source: /note="Description of Artificial Sequence: Synthetic oligonucleotide"
  source: /note="DNA/RNA"
  modified_base (1)..(1): 5-methyl bicyclic nucleic acid
  modified_base (2)..(2): bicyclic nucleic acid (BNA)
  modified_base (10)..(10): bicyclic nucleic acid (BNA)
  modified_base (11)..(11): bicyclic nucleic acid (BNA)
  source: /note="3' tri-ethylene glycol (TEG)"
caaggaagatg

SEQ ID NO: 21605 - DNA, 10 bp, Artificial Sequence
  source: /note="Description of Artificial Sequence: Synthetic oligonucleotide"
  source: /note="DNA/RNA"
  modified_base (1)..(1): 5-methyl bicyclic nucleic acid
  modified_base (2)..(2): bicyclic nucleic acid (BNA)
  modified_base (9)..(9): bicyclic nucleic acid (BNA)
  modified_base (10)..(10): bicyclic nucleic acid (BNA)
  source: /note="3' tri-ethylene glycol (TEG)"
caaggaagat

SEQ ID NO: 21606 - RNA, 9 nt, Artificial Sequence
  source: /note="Description of Artificial Sequence: Synthetic oligonucleotide"
  source: /note="RNA/Antisense Oligonucleotide"
  modified_base (1)..(1): 5-methyl bicyclic nucleic acid
  modified_base (2)..(2): bicyclic nucleic acid (BNA)
  modified_base (8)..(8): bicyclic nucleic acid (BNA)
  modified_base (9)..(9): bicyclic nucleic acid (BNA)
  source: /note="3' tri-ethylene glycol (TEG)"
caaggaaga

SEQ ID NO: 21607 - RNA, 8 nt, Artificial Sequence
  source: /note="Description of Artificial Sequence: Synthetic oligonucleotide"
  source: /note="RNA/Antisense Oligonucleotide"
  modified_base (1)..(1): 5-methyl bicyclic nucleic acid
  modified_base (2)..(2): bicyclic nucleic acid (BNA)
  modified_base (7)..(7): bicyclic nucleic acid (BNA)
  modified_base (8)..(8): bicyclic nucleic acid (BNA)
  source: /note="3' tri-ethylene glycol (TEG)"
caaggaag

SEQ ID NO: 21608 - RNA, 20 nt, Artificial Sequence
  source: /note="Description of Artificial Sequence: Synthetic oligonucleotide"
  source: /note="RNA"
  modified_base (1)..(1): bicyclic nucleic acid (BNA)
  modified_base (2)..(2): bicyclic nucleic acid (BNA)
  modified_base (12)..(12): 5-methyl modified nucleotide
  modified_base (17)..(17): 5-methyl modified nucleotide
  modified_base (19)..(19): bicyclic nucleic acid (BNA)
  modified_base (20)..(20): bicyclic nucleic acid (BNA)
  source: /note="3' tri-ethylene glycol (TEG)"
aaggaagauggcauuucuag

SEQ ID NO: 21609 - DNA, 19 bp, Artificial Sequence
  source: /note="Description of Artificial Sequence: Synthetic oligonucleotide"
  source: /note="Description of Combined DNA/RNA Molecule: Synthetic oligonucleotide"
  source: /note="DNA/RNA"
  modified_base (1)..(1): bicyclic nucleic acid (BNA)
  modified_base (2)..(2): bicyclic nucleic acid (BNA)
  modified_base (12)..(12): 5-methyl modified nucleotide
  modified_base (17)..(17): 5-methyl modified nucleotide
  modified_base (18)..(18): bicyclic nucleic acid (BNA)
  modified_base (19)..(19): bicyclic nucleic acid (BNA)
  source: /note="3' tri-ethylene glycol (TEG)"
aaggaagauggcauuucta

SEQ ID NO: 21610 - DNA, 18 bp, Artificial Sequence
  source: /note="Description of Artificial Sequence: Synthetic oligonucleotide"
  source: /note="Description of Combined DNA/RNA Molecule: Synthetic oligonucleotide"
  source: /note="DNA/RNA"
  modified_base (1)..(1): bicyclic nucleic acid (BNA)
  modified_base (2)..(2): bicyclic nucleic acid (BNA)
  modified_base (12)..(12): 5-methyl modified nucleotide
  modified_base (17)..(17): 5-methyl bicyclic nucleic acid
  modified_base (18)..(18): bicyclic nucleic acid (BNA)
  source: /note="3' tri-ethylene glycol (TEG)"
aaggaagauggcauuuct

SEQ ID NO: 21611 - DNA, 17 bp, Artificial Sequence
  source: /note="Description of Artificial Sequence: Synthetic oligonucleotide"
  source: /note="Description of Combined DNA/RNA Molecule: Synthetic oligonucleotide"
  source: /note="DNA/RNA"
  modified_base (1)..(1): bicyclic nucleic acid (BNA)
  modified_base (2)..(2): bicyclic nucleic acid (BNA)
  modified_base (12)..(12): 5-methyl modified nucleotide
  modified_base (16)..(16): bicyclic nucleic acid (BNA)
  modified_base (17)..(17): 5-methyl bicyclic nucleic acid
  source: /note="3' tri-ethylene glycol (TEG)"
aaggaagauggcauutc

SEQ ID NO: 21612 - DNA, 16 bp, Artificial Sequence
  source: /note="Description of Artificial Sequence: Synthetic oligonucleotide"
  source: /note="Description of Combined DNA/RNA Molecule: Synthetic oligonucleotide"
  source: /note="DNA/RNA"
  modified_base (1)..(1): bicyclic nucleic acid (BNA)
  modified_base (2)..(2): bicyclic nucleic acid (BNA)
  modified_base (12)..(12): 5-methyl modified nucleotide
  modified_base (15)..(15): bicyclic nucleic acid (BNA)
  modified_base (16)..(16): bicyclic nucleic acid (BNA)
  source: /note="3' tri-ethylene glycol (TEG)"
aaggaagauggcautt

SEQ ID NO: 21613 - DNA, 15 bp, Artificial Sequence
  source: /note="Description of Artificial Sequence: Synthetic oligonucleotide"
  source: /note="Description of Combined DNA/RNA Molecule: Synthetic oligonucleotide"
  source: /note="DNA/RNA"
  modified_base (1)..(1): bicyclic nucleic acid (BNA)
  modified_base (2)..(2): bicyclic nucleic acid (BNA)
  modified_base (12)..(12): 5-methyl modified nucleotide
  modified_base (14)..(14): bicyclic nucleic acid (BNA)
  modified_base (15)..(15): bicyclic nucleic acid (BNA)
  source: /note="3' tri-ethylene glycol (TEG)"
aaggaagauggcatt

SEQ ID NO: 21614 - DNA, 14 bp, Artificial Sequence
  source: /note="Description of Artificial Sequence: Synthetic oligonucleotide"
  source: /note="Description of Combined DNA/RNA Molecule: Synthetic oligonucleotide"
  source: /note="DNA/RNA"
  modified_base (1)..(1): bicyclic nucleic acid (BNA)
  modified_base (2)..(2): bicyclic nucleic acid (BNA)
  modified_base (12)..(12): 5-methyl modified nucleotide
  modified_base (13)..(13): bicyclic nucleic acid (BNA)
  modified_base (14)..(14): bicyclic nucleic acid (BNA)
  source: /note="3' tri-ethylene glycol (TEG)"
aaggaagauggcat

SEQ ID NO: 21615 - RNA, 13 nt, Artificial Sequence
  source: /note="Description of Artificial Sequence: Synthetic oligonucleotide"
  source: /note="RNA"
  modified_base (1)..(1): bicyclic nucleic acid (BNA)
  modified_base (2)..(2): bicyclic nucleic acid (BNA)
  modified_base (12)..(12): 5-methyl bicyclic nucleic acid
  modified_base (13)..(13): bicyclic nucleic acid (BNA)
  source: /note="3' tri-ethylene glycol (TEG)"
aaggaagauggca

SEQ ID NO: 21616 - RNA, 12 nt, Artificial Sequence
  source: /note="Description of Artificial Sequence: Synthetic oligonucleotide"
  source: /note="RNA"
  modified_base (1)..(1): bicyclic nucleic acid (BNA)
  modified_base (2)..(2): bicyclic nucleic acid (BNA)
  modified_base (11)..(11): bicyclic nucleic acid (BNA)
  modified_base (12)..(12): 5-methyl bicyclic nucleic acid
  source: /note="3' tri-ethylene glycol (TEG)"
aaggaagauggc

SEQ ID NO: 21617 - RNA, 11 nt, Artificial Sequence
  source: /note="Description of Artificial Sequence: Synthetic oligonucleotide"
  source: /note="RNA"
  modified_base (1)..(1): bicyclic nucleic acid (BNA)
  modified_base (2)..(2): bicyclic nucleic acid (BNA)
  modified_base (10)..(10): bicyclic nucleic acid (BNA)
  modified_base (11)..(11): bicyclic nucleic acid (BNA)
  source: /note="3' tri-ethylene glycol (TEG)"
aaggaagaugg

SEQ ID NO: 21618 - DNA, 10 bp, Artificial Sequence
  source: /note="Description of Artificial Sequence: Synthetic oligonucleotide"
  source: /note="DNA/RNA"
  modified_base (1)..(1): bicyclic nucleic acid (BNA)
  modified_base (2)..(2): bicyclic nucleic acid (BNA)
  modified_base (9)..(9): bicyclic nucleic acid (BNA)
  modified_base (10)..(10): bicyclic nucleic acid (BNA)
  source: /note="3' tri-ethylene glycol (TEG)"
aaggaagatg

SEQ ID NO: 21619 - DNA, 9 bp, Artificial Sequence
  source: /note="Description of Artificial Sequence: Synthetic oligonucleotide"
  source: /note="DNA/RNA"
  modified_base (1)..(1): bicyclic nucleic acid (BNA)
  modified_base (2)..(2): bicyclic nucleic acid (BNA)
  modified_base (8)..(8): bicyclic nucleic acid (BNA)
  modified_base (9)..(9): bicyclic nucleic acid (BNA)
  source: /note="3' tri-ethylene glycol (TEG)"
aaggaagat

SEQ ID NO: 21620 - RNA, 8 nt, Artificial Sequence
  source: /note="Description of Artificial Sequence: Synthetic oligonucleotide"
  source: /note="RNA/Antisense Oligonucleotide"
  modified_base (1)..(1): bicyclic nucleic acid (BNA)
  modified_base (2)..(2): bicyclic nucleic acid (BNA)
  modified_base (7)..(7): bicyclic nucleic acid (BNA)
  modified_base (8)..(8): bicyclic nucleic acid (BNA)
  source: /note="3' tri-ethylene glycol (TEG)"
aaggaaga

SEQ ID NO: 21621 - RNA, 19 nt, Artificial Sequence
  source: /note="Description of Artificial Sequence: Synthetic oligonucleotide"
  source: /note="RNA"
  modified_base (1)..(1): bicyclic nucleic acid (BNA)
  modified_base (2)..(2): bicyclic nucleic acid (BNA)
  modified_base (11)..(11): 5-methyl modified nucleotide
  modified_base (16)..(16): 5-methyl modified nucleotide
  modified_base (18)..(18): bicyclic nucleic acid (BNA)
  modified_base (19)..(19): bicyclic nucleic acid (BNA)
  source: /note="3' tri-ethylene glycol (TEG)"
aggaagauggcauuucuag

SEQ ID NO: 21622 - DNA, 18 bp, Artificial Sequence
  source: /note="Description of Artificial Sequence: Synthetic oligonucleotide"
  source: /note="Description of Combined DNA/RNA Molecule: Synthetic oligonucleotide"
  source: /note="DNA/RNA"
  modified_base (1)..(1): bicyclic nucleic acid (BNA)
  modified_base (2)..(2): bicyclic nucleic acid (BNA)
  modified_base (11)..(11): 5-methyl modified nucleotide
  modified_base (16)..(16): 5-methyl modified nucleotide
  modified_base (17)..(17): bicyclic nucleic acid (BNA)
  modified_base (18)..(18): bicyclic nucleic acid (BNA)
  source: /note="3' tri-ethylene glycol (TEG)"
aggaagauggcauuucta

SEQ ID NO: 21623 - DNA, 17 bp, Artificial Sequence
  source: /note="Description of Artificial Sequence: Synthetic oligonucleotide"
  source: /note="Description of Combined DNA/RNA Molecule: Synthetic oligonucleotide"
  source: /note="DNA/RNA"
  modified_base (1)..(1): bicyclic nucleic acid (BNA)
  modified_base (2)..(2): bicyclic nucleic acid (BNA)
  modified_base (11)..(11): 5-methyl modified nucleotide
  modified_base (16)..(16): 5-methyl bicyclic nucleic acid
  modified_base (17)..(17): bicyclic nucleic acid (BNA)
  source: /note="3' tri-ethylene glycol (TEG)"
aggaagauggcauuuct

SEQ ID NO: 21624 - DNA, 16 bp, Artificial Sequence
  source: /note="Description of Artificial Sequence: Synthetic oligonucleotide"
  source: /note="Description of Combined DNA/RNA Molecule: Synthetic oligonucleotide"
  source: /note="DNA/RNA"
  modified_base (1)..(1): bicyclic nucleic acid (BNA)
  modified_base (2)..(2): bicyclic nucleic acid (BNA)
  modified_base (11)..(11): 5-methyl modified nucleotide
  modified_base (15)..(15): bicyclic nucleic acid (BNA)
  modified_base (16)..(16): 5-methyl bicyclic nucleic acid
  source: /note="3' tri-ethylene glycol (TEG)"
aggaagauggcauutc

SEQ ID NO: 21625 - DNA, 15 bp, Artificial Sequence
  source: /note="Description of Artificial Sequence: Synthetic oligonucleotide"
  source: /note="Description of Combined DNA/RNA Molecule: Synthetic oligonucleotide"
  source: /note="DNA/RNA"
  modified_base (1)..(1): bicyclic nucleic acid (BNA)
  modified_base (2)..(2): bicyclic nucleic acid (BNA)
  modified_base (11)..(11): 5-methyl modified nucleotide
  modified_base (14)..(14): bicyclic nucleic acid (BNA)
  modified_base (15)..(15): bicyclic nucleic acid (BNA)
  source: /note="3' tri-ethylene glycol (TEG)"
aggaagauggcautt

SEQ ID NO: 21626 - DNA, 14 bp, Artificial Sequence
  source: /note="Description of Artificial Sequence: Synthetic oligonucleotide"
  source: /note="Description of Combined DNA/RNA Molecule: Synthetic oligonucleotide"
  source: /note="DNA/RNA"
  modified_base (1)..(1): bicyclic nucleic acid (BNA)
  modified_base (2)..(2): bicyclic nucleic acid (BNA)
  modified_base (11)..(11): 5-methyl modified nucleotide
  modified_base (13)..(13): bicyclic nucleic acid (BNA)
  modified_base (14)..(14): bicyclic nucleic acid (BNA)
  source: /note="3' tri-ethylene glycol (TEG)"
aggaagauggcatt

SEQ ID NO: 21627 - DNA, 13 bp, Artificial Sequence
  source: /note="Description of Artificial Sequence: Synthetic oligonucleotide"
  source: /note="Description of Combined DNA/RNA Molecule: Synthetic oligonucleotide"
  source: /note="DNA/RNA"
  modified_base (1)..(1): bicyclic nucleic acid (BNA)
  modified_base (2)..(2): bicyclic nucleic acid (BNA)
  modified_base (11)..(11): 5-methyl modified nucleotide
  modified_base (12)..(12): bicyclic nucleic acid (BNA)
  modified_base (13)..(13): bicyclic nucleic acid (BNA)
  source: /note="3' tri-ethylene glycol (TEG)"
aggaagauggcat

SEQ ID NO: 21628 - RNA, 12 nt, Artificial Sequence
  source: /note="Description of Artificial Sequence: Synthetic oligonucleotide"
  source: /note="RNA"
  modified_base (1)..(1): bicyclic nucleic acid (BNA)
  modified_base (2)..(2): bicyclic nucleic acid (BNA)
  modified_base (11)..(11): 5-methyl bicyclic nucleic acid
  modified_base (12)..(12): bicyclic nucleic acid (BNA)
  source: /note="3' tri-ethylene glycol (TEG)"
aggaagauggca

SEQ ID NO: 21629 - RNA, 10 nt, Artificial Sequence
  source: /note="Description of Artificial Sequence: Synthetic oligonucleotide"
  source: /note="RNA"
  modified_base (1)..(1): bicyclic nucleic acid (BNA)
  modified_base (2)..(2): bicyclic nucleic acid (BNA)
  modified_base (9)..(9): bicyclic nucleic acid (BNA)
  modified_base (10)..(10): bicyclic nucleic acid (BNA)
  source: /note="3' tri-ethylene glycol (TEG)"
aggaagaugg

SEQ ID NO: 21630 - DNA, 9 bp, Artificial Sequence
  source: /note="Description of Artificial Sequence: Synthetic oligonucleotide"
  source: /note="DNA/RNA"
  modified_base (1)..(1): bicyclic nucleic acid (BNA)
  modified_base (2)..(2): bicyclic nucleic acid (BNA)
  modified_base (8)..(8): bicyclic nucleic acid (BNA)
  modified_base (9)..(9): bicyclic nucleic acid (BNA)
  source: /note="3' tri-ethylene glycol (TEG)"
aggaagatg

SEQ ID NO: 21631 - DNA, 8 bp, Artificial Sequence
  source: /note="Description of Artificial Sequence: Synthetic oligonucleotide"
  source: /note="DNA/RNA"
  modified_base (1)..(1): bicyclic nucleic acid (BNA)
  modified_base (2)..(2): bicyclic nucleic acid (BNA)
  modified_base (7)..(7): bicyclic nucleic acid (BNA)
  modified_base (8)..(8): bicyclic nucleic acid (BNA)
  source: /note="3' tri-ethylene glycol (TEG)"
aggaagat

SEQ ID NO: 21632 - RNA, 18 nt, Artificial Sequence
  source: /note="Description of Artificial Sequence: Synthetic oligonucleotide"
  source: /note="RNA"
  modified_base (1)..(1): bicyclic nucleic acid (BNA)
  modified_base (2)..(2): bicyclic nucleic acid (BNA)
  modified_base (10)..(10): 5-methyl modified nucleotide
  modified_base (15)..(15): 5-methyl modified nucleotide
  modified_base (17)..(17): bicyclic nucleic acid (BNA)
  modified_base (18)..(18): bicyclic nucleic acid (BNA)
  source: /note="3' tri-ethylene glycol (TEG)"
ggaagauggcauuucuag

SEQ ID NO: 21633 - DNA, 17 bp, Artificial Sequence
  source: /note="Description of Artificial Sequence: Synthetic oligonucleotide"
  source: /note="Description of Combined DNA/RNA Molecule: Synthetic oligonucleotide"
  source: /note="DNA/RNA"
  modified_base (1)..(1): bicyclic nucleic acid (BNA)
  modified_base (2)..(2): bicyclic nucleic acid (BNA)
  modified_base (10)..(10): 5-methyl modified nucleotide
  modified_base (15)..(15): 5-methyl modified nucleotide
  modified_base (16)..(16): bicyclic nucleic acid (BNA)
  modified_base (17)..(17): bicyclic nucleic acid (BNA)
  source: /note="3' tri-ethylene glycol (TEG)"
ggaagauggcauuucta

SEQ ID NO: 21634 - DNA, 16 bp, Artificial Sequence
  source: /note="Description of Artificial Sequence: Synthetic oligonucleotide"
  source: /note="Description of Combined DNA/RNA Molecule: Synthetic oligonucleotide"
  source: /note="DNA/RNA"
  modified_base (1)..(1): bicyclic nucleic acid (BNA)
  modified_base (2)..(2): bicyclic nucleic acid (BNA)
  modified_base (10)..(10): 5-methyl modified nucleotide
  modified_base (15)..(15): 5-methyl bicyclic nucleic acid
  modified_base (16)..(16): bicyclic nucleic acid (BNA)
  source: /note="3' tri-ethylene glycol (TEG)"
ggaagauggcauuuct

SEQ ID NO: 21635 - DNA, 15 bp, Artificial Sequence
  source: /note="Description of Artificial Sequence: Synthetic oligonucleotide"
  source: /note="Description of Combined DNA/RNA Molecule: Synthetic oligonucleotide"
  source: /note="DNA/RNA"
  modified_base (1)..(1): bicyclic nucleic acid (BNA)
  modified_base (2)..(2): bicyclic nucleic acid (BNA)
  modified_base (10)..(10): 5-methyl modified nucleotide
  modified_base (14)..(14): bicyclic nucleic acid (BNA)
  modified_base (15)..(15): 5-methyl bicyclic nucleic acid
  source: /note="3' tri-ethylene glycol (TEG)"
ggaagauggcauutc

SEQ ID NO: 21636 - DNA, 14 bp, Artificial Sequence
  source: /note="Description of Artificial Sequence: Synthetic oligonucleotide"
  source: /note="Description of Combined DNA/RNA Molecule: Synthetic oligonucleotide"
  source: /note="DNA/RNA"
  modified_base (1)..(1): bicyclic nucleic acid (BNA)
  modified_base (2)..(2): bicyclic nucleic acid (BNA)
  modified_base (10)..(10): 5-methyl modified nucleotide
  modified_base (13)..(13): bicyclic nucleic acid (BNA)
  modified_base (14)..(14): bicyclic nucleic acid (BNA)
  source: /note="3' tri-ethylene glycol (TEG)"
ggaagauggcautt

SEQ ID NO: 21637 - DNA, 13 bp, Artificial Sequence
  source: /note="Description of Artificial Sequence: Synthetic oligonucleotide"
  source: /note="Description of Combined DNA/RNA Molecule: Synthetic oligonucleotide"
  source: /note="DNA/RNA"
  modified_base (1)..(1): bicyclic nucleic acid (BNA)
  modified_base (2)..(2): bicyclic nucleic acid (BNA)
  modified_base (10)..(10): 5-methyl modified nucleotide
  modified_base (12)..(12): bicyclic nucleic acid (BNA)
  modified_base (13)..(13): bicyclic nucleic acid (BNA)
  source: /note="3' tri-ethylene glycol (TEG)"
ggaagauggcatt

SEQ ID NO: 21638 - DNA, 12 bp, Artificial Sequence
  source: /note="Description of Artificial Sequence: Synthetic oligonucleotide"
  source: /note="Description of Combined DNA/RNA Molecule: Synthetic oligonucleotide"
  source: /note="DNA/RNA"
  modified_base (1)..(1): bicyclic nucleic acid (BNA)
  modified_base (2)..(2): bicyclic nucleic acid (BNA)
  modified_base (10)..(10): 5-methyl modified nucleotide
  modified_base (11)..(11): bicyclic nucleic acid (BNA)
  modified_base (12)..(12): bicyclic nucleic acid (BNA)
  source: /note="3' tri-ethylene glycol (TEG)"
ggaagauggcat

SEQ ID NO: 21639 - RNA, 11 nt, Artificial Sequence
  source: /note="Description of Artificial Sequence: Synthetic oligonucleotide"
  source: /note="RNA"
  modified_base (1)..(1): bicyclic nucleic acid (BNA)
  modified_base (2)..(2): bicyclic nucleic acid (BNA)
  modified_base (10)..(10): 5-methyl bicyclic nucleic acid
  modified_base (11)..(11): bicyclic nucleic acid (BNA)
  source: /note="3' tri-ethylene glycol (TEG)"
ggaagauggca

SEQ ID NO: 21640 - RNA, 10 nt, Artificial Sequence
  source: /note="Description of Artificial Sequence: Synthetic oligonucleotide"
  source: /note="RNA"
  modified_base (1)..(1): bicyclic nucleic acid (BNA)
  modified_base (2)..(2): bicyclic nucleic acid (BNA)
  modified_base (9)..(9): bicyclic nucleic acid (BNA)
  modified_base (10)..(10): 5-methyl bicyclic nucleic acid
  source: /note="3' tri-ethylene glycol (TEG)"
ggaagauggc

SEQ ID NO: 21641 - DNA, 8 bp, Artificial Sequence
  source: /note="Description of Artificial Sequence: Synthetic oligonucleotide"
  source: /note="DNA/RNA"
  modified_base (1)..(1): bicyclic nucleic acid (BNA)
  modified_base (2)..(2): bicyclic nucleic acid (BNA)
  modified_base (7)..(7): bicyclic nucleic acid (BNA)
  modified_base (8)..(8): bicyclic nucleic acid (BNA)
  source: /note="3' tri-ethylene glycol (TEG)"
ggaagatg

SEQ ID NO: 21642 - RNA, 17 nt, Artificial Sequence
  source: /note="Description of Artificial Sequence: Synthetic oligonucleotide"
  source: /note="RNA"
  modified_base (1)..(1): bicyclic nucleic acid (BNA)
  modified_base (2)..(2): bicyclic nucleic acid (BNA)
  modified_base (9)..(9): 5-methyl modified nucleotide
  modified_base (14)..(14): 5-methyl modified nucleotide
  modified_base (16)..(16): bicyclic nucleic acid (BNA)
  modified_base (17)..(17): bicyclic nucleic acid (BNA)
  source: /note="3' tri-ethylene glycol (TEG)"
gaagauggcauuucuag

SEQ ID NO: 21643 - DNA, 16 bp, Artificial Sequence
  source: /note="Description of Artificial Sequence: Synthetic oligonucleotide"
  source: /note="Description of Combined DNA/RNA Molecule: Synthetic oligonucleotide"
  source: /note="DNA/RNA"
  modified_base (1)..(1): bicyclic nucleic acid (BNA)
  modified_base (2)..(2): bicyclic nucleic acid (BNA)
  modified_base (9)..(9): 5-methyl modified nucleotide
  modified_base (14)..(14): 5-methyl modified nucleotide
  modified_base (15)..(15): bicyclic nucleic acid (BNA)
  modified_base (16)..(16): bicyclic nucleic acid (BNA)
  source: /note="3' tri-ethylene glycol (TEG)"
gaagauggcauuucta

SEQ ID NO: 21644 - DNA, 14 bp, Artificial Sequence
  source: /note="Description of Artificial Sequence: Synthetic oligonucleotide"
  source: /note="Description of Combined DNA/RNA Molecule: Synthetic oligonucleotide"
  source: /note="DNA/RNA"
  modified_base (1)..(1): bicyclic nucleic acid (BNA)
  modified_base (2)..(2): bicyclic nucleic acid (BNA)
  modified_base (9)..(9): 5-methyl modified nucleotide
  modified_base (13)..(13): bicyclic nucleic acid (BNA)
  modified_base (14)..(14): 5-methyl bicyclic nucleic acid
  source: /note="3' tri-ethylene glycol (TEG)"
gaagauggcauutc

SEQ ID NO: 21645 - DNA, 13 bp, Artificial Sequence
  source: /note="Description of Artificial Sequence: Synthetic oligonucleotide"
  source: /note="Description of Combined DNA/RNA Molecule: Synthetic oligonucleotide"
  source: /note="DNA/RNA"
  modified_base (1)..(1): bicyclic nucleic acid (BNA)
  modified_base (2)..(2): bicyclic nucleic acid (BNA)
  modified_base (9)..(9): 5-methyl modified nucleotide
  modified_base (12)..(12): bicyclic nucleic acid (BNA)
  modified_base (13)..(13): bicyclic nucleic acid (BNA)
  source: /note="3' tri-ethylene glycol (TEG)"
gaagauggcautt

SEQ ID NO: 21646 - DNA, 12 bp, Artificial Sequence
  source: /note="Description of Artificial Sequence: Synthetic oligonucleotide"
  source: /note="Description of Combined DNA/RNA Molecule: Synthetic oligonucleotide"
  source: /note="DNA/RNA"
  modified_base (1)..(1): bicyclic nucleic acid (BNA)
  modified_base (2)..(2): bicyclic nucleic acid (BNA)
  modified_base (9)..(9): 5-methyl modified nucleotide
  modified_base (11)..(11): bicyclic nucleic acid (BNA)
  modified_base (12)..(12): bicyclic nucleic acid (BNA)
  source: /note="3' tri-ethylene glycol (TEG)"
gaagauggcatt

SEQ ID NO: 21647 - DNA, 11 bp, Artificial Sequence
  source: /note="Description of Artificial Sequence: Synthetic oligonucleotide"
  source: /note="Description of Combined DNA/RNA Molecule: Synthetic oligonucleotide"
  source: /note="DNA/RNA"
  modified_base (1)..(1): bicyclic nucleic acid (BNA)
  modified_base (2)..(2): bicyclic nucleic acid (BNA)
  modified_base (9)..(9): 5-methyl modified nucleotide
  modified_base (10)..(10): bicyclic nucleic acid (BNA)
  modified_base (11)..(11): bicyclic nucleic acid (BNA)
  source: /note="3' tri-ethylene glycol (TEG)"
gaagauggcat

SEQ ID NO: 21648 - RNA, 10 nt, Artificial Sequence
  source: /note="Description of Artificial Sequence: Synthetic oligonucleotide"
  source: /note="RNA"
  modified_base (1)..(1): bicyclic nucleic acid (BNA)
  modified_base (2)..(2): bicyclic nucleic acid (BNA)
  modified_base (9)..(9): 5-methyl bicyclic nucleic acid
  modified_base (10)..(10): bicyclic nucleic acid (BNA)
  source: /note="3' tri-ethylene glycol (TEG)"
gaagauggca

SEQ ID NO: 21649 - RNA, 9 nt, Artificial Sequence
  source: /note="Description of Artificial Sequence: Synthetic oligonucleotide"
  source: /note="RNA"
  modified_base (1)..(1): bicyclic nucleic acid (BNA)
  modified_base (2)..(2): bicyclic nucleic acid (BNA)
  modified_base (8)..(8): bicyclic nucleic acid (BNA)
  modified_base (9)..(9): 5-methyl bicyclic nucleic acid
  source: /note="3' tri-ethylene glycol (TEG)"
gaagauggc

SEQ ID NO: 21650 - RNA, 8 nt, Artificial Sequence
  source: /note="Description of Artificial Sequence: Synthetic oligonucleotide"
  source: /note="RNA"
  modified_base (1)..(1): bicyclic nucleic acid (BNA)
  modified_base (2)..(2): bicyclic nucleic acid (BNA)
  modified_base (7)..(7): bicyclic nucleic acid (BNA)
  modified_base (8)..(8): bicyclic nucleic acid (BNA)
  source: /note="3' tri-ethylene glycol (TEG)"
gaagaugg

SEQ ID NO: 21651 - RNA, 16 nt, Artificial Sequence
  source: /note="Description of Artificial Sequence: Synthetic oligonucleotide"
  source: /note="RNA"
  modified_base (1)..(1): bicyclic nucleic acid (BNA)
  modified_base (2)..(2): bicyclic nucleic acid (BNA)
  modified_base (8)..(8): 5-methyl modified nucleotide
  modified_base (13)..(13): 5-methyl modified nucleotide
  modified_base (15)..(15): bicyclic nucleic acid (BNA)
  modified_base (16)..(16): bicyclic nucleic acid (BNA)
  source: /note="3' tri-ethylene glycol (TEG)"
aagauggcauuucuag

SEQ ID NO: 21652 - DNA, 15 bp, Artificial Sequence
  source: /note="Description of Artificial Sequence: Synthetic oligonucleotide"
  source: /note="Description of Combined DNA/RNA Molecule: Synthetic oligonucleotide"
  source: /note="DNA/RNA"
  modified_base (1)..(1): bicyclic nucleic acid (BNA)
  modified_base (2)..(2): bicyclic nucleic acid (BNA)
  modified_base (8)..(8): 5-methyl modified nucleotide
  modified_base (13)..(13): 5-methyl modified nucleotide
  modified_base (14)..(14): bicyclic nucleic acid (BNA)
  modified_base (15)..(15): bicyclic nucleic acid (BNA)
  source: /note="3' tri-ethylene glycol (TEG)"
aagauggcauuucta

SEQ ID NO: 21653 - DNA, 14 bp, Artificial Sequence
  source: /note="Description of Artificial Sequence: Synthetic oligonucleotide"
  source: /note="Description of Combined DNA/RNA Molecule: Synthetic oligonucleotide"
  source: /note="DNA/RNA"
  modified_base (1)..(1): bicyclic nucleic acid (BNA)
  modified_base (2)..(2): bicyclic nucleic acid (BNA)
  modified_base (8)..(8): 5-methyl modified nucleotide
  modified_base (13)..(13): 5-methyl bicyclic nucleic acid
  modified_base (14)..(14): bicyclic nucleic acid (BNA)
  source: /note="3' tri-ethylene glycol (TEG)"
aagauggcauuuct

SEQ ID NO: 21654 - DNA, 13 bp, Artificial Sequence
  source: /note="Description of Artificial Sequence: Synthetic oligonucleotide"
  source: /note="Description of Combined DNA/RNA Molecule: Synthetic oligonucleotide"
  source: /note="DNA/RNA"
  modified_base (1)..(1): bicyclic nucleic acid (BNA)
  modified_base (2)..(2): bicyclic nucleic acid (BNA)
  modified_base (8)..(8): 5-methyl modified nucleotide
  modified_base (12)..(12): bicyclic nucleic acid (BNA)
  modified_base (13)..(13): 5-methyl bicyclic nucleic acid
  source: /note="3' tri-ethylene glycol (TEG)"
aagauggcauutc

SEQ ID NO: 21655 - DNA, 12 bp, Artificial Sequence
  source: /note="Description of Artificial Sequence: Synthetic oligonucleotide"
  source: /note="Description of Combined DNA/RNA Molecule: Synthetic oligonucleotide"
  source: /note="DNA/RNA"
  modified_base (1)..(1): bicyclic nucleic acid (BNA)
  modified_base (2)..(2): bicyclic nucleic acid (BNA)
  modified_base (8)..(8): 5-methyl modified nucleotide
  modified_base (11)..(11): bicyclic nucleic acid (BNA)
  modified_base (12)..(12): bicyclic nucleic acid (BNA)
  source: /note="3' tri-ethylene glycol (TEG)"
aagauggcautt

SEQ ID NO: 21656 - DNA, 11 bp, Artificial Sequence
  source: /note="Description of Artificial Sequence: Synthetic oligonucleotide"
  source: /note="Description of Combined DNA/RNA Molecule: Synthetic oligonucleotide"
  source: /note="DNA/RNA"
  modified_base (1)..(1): bicyclic nucleic acid (BNA)
  modified_base (2)..(2): bicyclic nucleic acid (BNA)
  modified_base (8)..(8): 5-methyl modified nucleotide
  modified_base (10)..(10): bicyclic nucleic acid (BNA)
  modified_base (11)..(11): bicyclic nucleic acid (BNA)
  source: /note="3' tri-ethylene glycol (TEG)"
aagauggcatt

SEQ ID NO: 21657 - DNA, 10 bp, Artificial Sequence
  source: /note="Description of Artificial Sequence: Synthetic oligonucleotide"
  source: /note="Description of Combined DNA/RNA Molecule: Synthetic oligonucleotide"
  source: /note="DNA/RNA"
  modified_base (1)..(1): bicyclic nucleic acid (BNA)
  modified_base (2)..(2): bicyclic nucleic acid (BNA)
  modified_base (8)..(8): 5-methyl modified nucleotide
  modified_base (9)..(9): bicyclic nucleic acid (BNA)
  modified_base (10)..(10): bicyclic nucleic acid (BNA)
  source: /note="3' tri-ethylene glycol (TEG)"
aagauggcat

SEQ ID NO: 21658 - RNA, 9 nt, Artificial Sequence
  source: /note="Description of Artificial Sequence: Synthetic oligonucleotide"
  source: /note="RNA"
  modified_base (1)..(1): bicyclic nucleic acid (BNA)
  modified_base (2)..(2): bicyclic nucleic acid (BNA)
  modified_base (8)..(8): 5-methyl bicyclic nucleic acid
  modified_base (9)..(9): bicyclic nucleic acid (BNA)
  source: /note="3' tri-ethylene glycol (TEG)"
aagauggca

SEQ ID NO: 21659 - RNA, 8 nt, Artificial Sequence
  source: /note="Description of Artificial Sequence: Synthetic oligonucleotide"
  source: /note="RNA"
  modified_base (1)..(1): bicyclic nucleic acid (BNA)
  modified_base (2)..(2): bicyclic nucleic acid (BNA)
  modified_base (7)..(7): bicyclic nucleic acid (BNA)
  modified_base (8)..(8): 5-methyl bicyclic nucleic acid
  source: /note="3' tri-ethylene glycol (TEG)"
aagauggc

SEQ ID NO: 21660 - RNA, 15 nt, Artificial Sequence
  source: /note="Description of Artificial Sequence: Synthetic oligonucleotide"
  source: /note="RNA"
  modified_base (1)..(1): bicyclic nucleic acid (BNA)
  modified_base (2)..(2): bicyclic nucleic acid (BNA)
  modified_base (7)..(7): 5-methyl modified nucleotide
  modified_base (12)..(12): 5-methyl modified nucleotide
  modified_base (14)..(14): bicyclic nucleic acid (BNA)
  modified_base (15)..(15): bicyclic nucleic acid (BNA)
  source: /note="3' tri-ethylene glycol (TEG)"
agauggcauuucuag

SEQ ID NO: 21661 - DNA, 14 bp, Artificial Sequence
  source: /note="Description of Artificial Sequence: Synthetic oligonucleotide"
  source: /note="Description of Combined DNA/RNA Molecule: Synthetic oligonucleotide"
  source: /note="DNA/RNA"
  modified_base (1)..(1): bicyclic nucleic acid (BNA)
  modified_base (2)..(2): bicyclic nucleic acid (BNA)
  modified_base (7)..(7): 5-methyl modified nucleotide
  modified_base (12)..(12): 5-methyl modified nucleotide
  modified_base (13)..(13): bicyclic nucleic acid (BNA)
  modified_base (14)..(14): bicyclic nucleic acid (BNA)
  source: /note="3' tri-ethylene glycol (TEG)"
agauggcauuucta

SEQ ID NO: 21662 - DNA, 13 bp, Artificial Sequence
  source: /note="Description of Artificial Sequence: Synthetic oligonucleotide"
  source: /note="Description of Combined DNA/RNA Molecule: Synthetic oligonucleotide"
  source: /note="DNA/RNA"
  modified_base (1)..(1): bicyclic nucleic acid (BNA)
  modified_base (2)..(2): bicyclic nucleic acid (BNA)
  modified_base (7)..(7): 5-methyl modified nucleotide
  modified_base (12)..(12): 5-methyl bicyclic nucleic acid
  modified_base (13)..(13): bicyclic nucleic acid (BNA)
  source: /note="3' tri-ethylene glycol (TEG)"
agauggcauuuct

SEQ ID NO: 21663 - DNA, 12 bp, Artificial Sequence
  source: /note="Description of Artificial Sequence: Synthetic oligonucleotide"
  source: /note="Description of Combined DNA/RNA Molecule: Synthetic oligonucleotide"
  source: /note="DNA/RNA"
  modified_base (1)..(1): bicyclic nucleic acid (BNA)
  modified_base (2)..(2): bicyclic nucleic acid (BNA)
  modified_base (7)..(7): 5-methyl modified nucleotide
  modified_base (11)..(11): bicyclic nucleic acid (BNA)
  modified_base (12)..(12): 5-methyl bicyclic nucleic acid
  source: /note="3' tri-ethylene glycol (TEG)"
agauggcauutc

SEQ ID NO: 21664 - DNA, 11 bp, Artificial Sequence
  source: /note="Description of Artificial Sequence: Synthetic oligonucleotide"
  source: /note="Description of Combined DNA/RNA Molecule: Synthetic oligonucleotide"
  source: /note="DNA/RNA"
  modified_base (1)..(1): bicyclic nucleic acid (BNA)
  modified_base (2)..(2): bicyclic nucleic acid (BNA)
  modified_base (7)..(7): 5-methyl modified nucleotide
  modified_base (10)..(10): bicyclic nucleic acid (BNA)
  modified_base (11)..(11): bicyclic nucleic acid (BNA)
  source: /note="3' tri-ethylene glycol (TEG)"
agauggcautt

SEQ ID NO: 21665 - DNA, 10 bp, Artificial Sequence
  source: /note="Description of Artificial Sequence: Synthetic oligonucleotide"
  source: /note="Description of Combined DNA/RNA Molecule: Synthetic oligonucleotide"
  source: /note="DNA/RNA"
  modified_base (1)..(1): bicyclic nucleic acid (BNA)
  modified_base (2)..(2): bicyclic nucleic acid (BNA)
  modified_base (7)..(7): 5-methyl modified nucleotide
  modified_base (9)..(9): bicyclic nucleic acid (BNA)
  modified_base (10)..(10): bicyclic nucleic acid (BNA)
  source: /note="3' tri-ethylene glycol (TEG)"
agauggcatt

SEQ ID NO: 21666 - DNA, 9 bp, Artificial Sequence
  source: /note="Description of Artificial Sequence: Synthetic oligonucleotide"
  source: /note="Description of Combined DNA/RNA Molecule: Synthetic oligonucleotide"
  source: /note="DNA/RNA"
  modified_base (1)..(1): bicyclic nucleic acid (BNA)
  modified_base (2)..(2): bicyclic nucleic acid (BNA)
  modified_base (7)..(7): 5-methyl modified nucleotide
  modified_base (8)..(8): bicyclic nucleic acid (BNA)
  modified_base (9)..(9): bicyclic nucleic acid (BNA)
  source: /note="3' tri-ethylene glycol (TEG)"
agauggcat

SEQ ID NO: 21667 - RNA, 8 nt, Artificial Sequence
  source: /note="Description of Artificial Sequence: Synthetic oligonucleotide"
  source: /note="RNA"
  modified_base (1)..(1): bicyclic nucleic acid (BNA)
  modified_base (2)..(2): bicyclic nucleic acid (BNA)
  modified_base (7)..(7): 5-methyl bicyclic nucleic acid
  modified_base (8)..(8): bicyclic nucleic acid (BNA)
  source: /note="3' tri-ethylene glycol (TEG)"
agauggca

SEQ ID NO: 21668 - DNA, 30 bp, Artificial Sequence; identical to SEQ ID NO: 8204
  source: /note="Description of Artificial Sequence: Synthetic oligonucleotide"
  source: /note="Description of Combined DNA/RNA Molecule: Synthetic oligonucleotide"
  source: /note="DNA/RNA"
  modified_base (1)..(1): 5-methyl bicyclic nucleic acid
  modified_base (2)..(2): bicyclic nucleic acid (BNA)
  modified_base (3)..(3): 5-methyl modified nucleotide
  modified_base (4)..(4): 5-methyl modified nucleotide
  modified_base (7)..(7): 5-methyl modified nucleotide
  modified_base (10)..(10): 5-methyl modified nucleotide
  modified_base (22)..(22): 5-methyl modified nucleotide
  modified_base (27)..(27): 5-methyl modified nucleotide
  modified_base (29)..(29): bicyclic nucleic acid (BNA)
  modified_base (30)..(30): bicyclic nucleic acid (BNA)
  source: /note="3' tri-ethylene glycol (TEG)"

SEQ ID NO: 21669 - DNA, 29 bp, Artificial Sequence
  source: /note="Description of Artificial Sequence: Synthetic oligonucleotide"
  source: /note="Description of Combined DNA/RNA Molecule: Synthetic oligonucleotide"
  source: /note="DNA/RNA"
  modified_base (1)..(1): 5-methyl bicyclic nucleic acid
  modified_base (2)..(2): bicyclic nucleic acid (BNA)
  modified_base (3)..(3): 5-methyl modified nucleotide
  modified_base (4)..(4): 5-methyl modified nucleotide
  modified_base (7)..(7): 5-methyl modified nucleotide
  modified_base (10)..(10): 5-methyl modified nucleotide
  modified_base (22)..(22): 5-methyl modified nucleotide
  modified_base (27)..(27): 5-methyl modified nucleotide
  modified_base (28)..(28): bicyclic nucleic acid (BNA)
  modified_base (29)..(29): bicyclic nucleic acid (BNA)
  source: /note="3' tri-ethylene glycol (TEG)"
ctccaacaucaaggaagauggcauuucta

SEQ ID NO: 21670 - DNA, 28 bp, Artificial Sequence
  source: /note="Description of Artificial Sequence: Synthetic oligonucleotide"
  source: /note="Description of Combined DNA/RNA Molecule: Synthetic oligonucleotide"
  source: /note="DNA/RNA"
  modified_base (1)..(1): 5-methyl bicyclic nucleic acid
  modified_base (2)..(2): bicyclic nucleic acid (BNA)
  modified_base (3)..(3): 5-methyl modified nucleotide
  modified_base (4)..(4): 5-methyl modified nucleotide
  modified_base (7)..(7): 5-methyl modified nucleotide
  modified_base (10)..(10): 5-methyl modified nucleotide
  modified_base (22)..(22): 5-methyl modified nucleotide
  modified_base (27)..(27): 5-methyl bicyclic nucleic acid
  modified_base (28)..(28): bicyclic nucleic acid (BNA)
  source: /note="3' tri-ethylene glycol (TEG)"
ctccaacaucaaggaagauggcauuuct

SEQ ID NO: 21671 - DNA, 27 bp, Artificial Sequence
  source: /note="Description of Artificial Sequence: Synthetic oligonucleotide"
  source: /note="Description of Combined DNA/RNA Molecule: Synthetic oligonucleotide"
  source: /note="DNA/RNA"
  modified_base (1)..(1): 5-methyl bicyclic nucleic acid
  modified_base (2)..(2): bicyclic nucleic acid (BNA)
  modified_base (3)..(3): 5-methyl modified nucleotide
  modified_base (4)..(4): 5-methyl modified nucleotide
  modified_base (7)..(7): 5-methyl modified nucleotide
  modified_base (10)..(10): 5-methyl modified nucleotide
  modified_base (22)..(22): 5-methyl modified nucleotide
  modified_base (26)..(26): bicyclic nucleic acid (BNA)
  modified_base (27)..(27): 5-methyl bicyclic nucleic acid
  source: /note="3' tri-ethylene glycol (TEG)"
ctccaacaucaaggaagauggcauutc

SEQ ID NO: 21672 - DNA, 26 bp, Artificial Sequence
  source: /note="Description of Artificial Sequence: Synthetic oligonucleotide"
  source: /note="Description of Combined DNA/RNA Molecule: Synthetic oligonucleotide"
  source: /note="DNA/RNA"
  modified_base (1)..(1): 5-methyl bicyclic nucleic acid
  modified_base (2)..(2): bicyclic nucleic acid (BNA)
  modified_base (3)..(3): 5-methyl modified nucleotide
  modified_base (4)..(4): 5-methyl modified nucleotide
  modified_base (7)..(7): 5-methyl modified nucleotide
  modified_base (10)..(10): 5-methyl modified nucleotide
  modified_base (22)..(22): 5-methyl modified nucleotide
  modified_base (25)..(25): bicyclic nucleic acid (BNA)
  modified_base (26)..(26): bicyclic nucleic acid (BNA)
  source: /note="3' tri-ethylene glycol (TEG)"
ctccaacaucaaggaagauggcautt

SEQ ID NO: 21673 - DNA, 25 bp, Artificial Sequence
  source: /note="Description of Artificial Sequence: Synthetic oligonucleotide"
  source: /note="Description of Combined DNA/RNA Molecule: Synthetic oligonucleotide"
  source: /note="DNA/RNA"
  modified_base (1)..(1): 5-methyl bicyclic nucleic acid
  modified_base (2)..(2): bicyclic nucleic acid (BNA)
  modified_base (3)..(3): 5-methyl modified nucleotide
  modified_base (4)..(4): 5-methyl modified nucleotide
  modified_base (7)..(7): 5-methyl modified nucleotide
  modified_base (10)..(10): 5-methyl modified nucleotide
  modified_base (22)..(22): 5-methyl modified nucleotide
  modified_base (24)..(24): bicyclic nucleic acid (BNA)
  modified_base (25)..(25): bicyclic nucleic acid (BNA)
  source: /note="3' tri-ethylene glycol (TEG)"
ctccaacaucaaggaagauggcatt

SEQ ID NO: 21674 - DNA, 24 bp, Artificial Sequence
  source: /note="Description of Artificial Sequence: Synthetic oligonucleotide"
  source: /note="Description of Combined DNA/RNA Molecule: Synthetic oligonucleotide"
  source: /note="DNA/RNA"
  modified_base (1)..(1): 5-methyl bicyclic nucleic acid
  modified_base (2)..(2): bicyclic nucleic acid (BNA)
  modified_base (3)..(3): 5-methyl modified nucleotide
  modified_base (4)..(4): 5-methyl modified nucleotide
  modified_base (7)..(7): 5-methyl modified nucleotide
  modified_base (10)..(10): 5-methyl modified nucleotide
  modified_base (22)..(22): 5-methyl modified nucleotide
  modified_base (23)..(23): bicyclic nucleic acid (BNA)
  modified_base (24)..(24): bicyclic nucleic acid (BNA)
  source: /note="3' tri-ethylene glycol (TEG)"
ctccaacaucaaggaagauggcat

SEQ ID NO: 21675 - DNA, 23 bp, Artificial Sequence
  source: /note="Description of Artificial Sequence: Synthetic oligonucleotide"
  source: /note="Description of Combined DNA/RNA Molecule: Synthetic oligonucleotide"
  source: /note="DNA/RNA"
  modified_base (1)..(1): 5-methyl bicyclic nucleic acid
  modified_base (2)..(2): bicyclic nucleic acid (BNA)
  modified_base (3)..(3): 5-methyl modified nucleotide
  modified_base (4)..(4): 5-methyl modified nucleotide
  modified_base (7)..(7): 5-methyl modified nucleotide
  modified_base (10)..(10): 5-methyl modified nucleotide
  modified_base (22)..(22): 5-methyl bicyclic nucleic acid
  modified_base (23)..(23): bicyclic nucleic acid (BNA)
  source: /note="3' tri-ethylene glycol (TEG)"
ctccaacaucaaggaagauggca

SEQ ID NO: 21676 - DNA, 22 bp, Artificial Sequence
  source: /note="Description of Artificial Sequence: Synthetic oligonucleotide"
  source: /note="Description of Combined DNA/RNA Molecule: Synthetic oligonucleotide"
  source: /note="DNA/RNA"
  modified_base (1)..(1): 5-methyl bicyclic nucleic acid
  modified_base (2)..(2): bicyclic nucleic acid (BNA)
  modified_base (3)..(3): 5-methyl modified nucleotide
  modified_base (4)..(4): 5-methyl modified nucleotide
  modified_base (7)..(7): 5-methyl modified nucleotide
  modified_base (10)..(10): 5-methyl modified nucleotide
  modified_base (21)..(21): bicyclic nucleic acid (BNA)
  modified_base (22)..(22): 5-methyl bicyclic nucleic acid
  source: /note="3' tri-ethylene glycol (TEG)"
ctccaacaucaaggaagauggc

SEQ ID NO: 21677 - DNA, 21 bp, Artificial Sequence
  source: /note="Description of Artificial Sequence: Synthetic oligonucleotide"
  source: /note="Description of Combined DNA/RNA Molecule: Synthetic oligonucleotide"
  source: /note="DNA/RNA"
  modified_base (1)..(1): 5-methyl bicyclic nucleic acid
  modified_base (2)..(2): bicyclic nucleic acid (BNA)
  modified_base (3)..(3): 5-methyl modified nucleotide
  modified_base (4)..(4): 5-methyl modified nucleotide
  modified_base (7)..(7): 5-methyl modified nucleotide
  modified_base (10)..(10): 5-methyl modified nucleotide
  modified_base (20)..(20): bicyclic nucleic acid (BNA)
  modified_base (21)..(21): bicyclic nucleic acid (BNA)
  source: /note="3' tri-ethylene glycol (TEG)"
ctccaacaucaaggaagaugg

SEQ ID NO: 21678 - DNA, 20 bp, Artificial Sequence
  source: /note="Description of Artificial Sequence: Synthetic oligonucleotide"
  source: /note="Description of Combined DNA/RNA Molecule: Synthetic oligonucleotide"
  source: /note="DNA/RNA"
  modified_base (1)..(1): 5-methyl bicyclic nucleic acid
  modified_base (2)..(2): bicyclic nucleic acid (BNA)
  modified_base (3)..(3): 5-methyl modified nucleotide
  modified_base (4)..(4): 5-methyl modified nucleotide
  modified_base (7)..(7): 5-methyl modified nucleotide
  modified_base (10)..(10): 5-methyl modified nucleotide
  modified_base (19)..(19): bicyclic nucleic acid (BNA)
  modified_base (20)..(20): bicyclic nucleic acid (BNA)
  source: /note="3' tri-ethylene glycol (TEG)"
ctccaacaucaaggaagatg

SEQ ID NO: 21679 - DNA, 19 bp, Artificial Sequence
  source: /note="Description of Artificial Sequence: Synthetic oligonucleotide"
  source: /note="Description of Combined DNA/RNA Molecule: Synthetic oligonucleotide"
  source: /note="DNA/RNA"
  modified_base (1)..(1): 5-methyl bicyclic nucleic acid
  modified_base (2)..(2): bicyclic nucleic acid (BNA)
  modified_base (3)..(3): 5-methyl modified nucleotide
  modified_base (4)..(4): 5-methyl modified nucleotide
  modified_base (7)..(7): 5-methyl modified nucleotide
  modified_base (10)..(10): 5-methyl modified nucleotide
  modified_base (18)..(18): bicyclic nucleic acid (BNA)
  modified_base (19)..(19): bicyclic nucleic acid (BNA)
  source: /note="3' tri-ethylene glycol (TEG)"
ctccaacaucaaggaagat

SEQ ID NO: 21680 - DNA, 18 bp, Artificial Sequence
  source: /note="Description of Artificial Sequence: Synthetic oligonucleotide"
  source: /note="Description of Combined DNA/RNA Molecule: Synthetic oligonucleotide"
  source: /note="DNA/RNA"
  modified_base (1)..(1): 5-methyl bicyclic nucleic acid
  modified_base (2)..(2): bicyclic nucleic acid (BNA)
  modified_base (3)..(3): 5-methyl modified nucleotide
  modified_base (4)..(4): 5-methyl modified nucleotide
  modified_base (7)..(7): 5-methyl modified nucleotide
  modified_base (10)..(10): 5-methyl modified nucleotide
  modified_base (17)..(17): bicyclic nucleic acid (BNA)
  modified_base (18)..(18): bicyclic nucleic acid (BNA)
  source: /note="3' tri-ethylene glycol (TEG)"
ctccaacaucaaggaaga

SEQ ID NO: 21681 - DNA, 17 bp, Artificial Sequence
  source: /note="Description of Artificial Sequence: Synthetic oligonucleotide"
  source: /note="Description of Combined DNA/RNA Molecule: Synthetic oligonucleotide"
  source: /note="DNA/RNA"
  modified_base (1)..(1): 5-methyl bicyclic nucleic acid
  modified_base (2)..(2): bicyclic nucleic acid (BNA)
  modified_base (3)..(3): 5-methyl modified nucleotide
  modified_base (4)..(4): 5-methyl modified nucleotide
  modified_base (7)..(7): 5-methyl modified nucleotide
  modified_base (10)..(10): 5-methyl modified nucleotide
  modified_base (16)..(16): bicyclic nucleic acid (BNA)
  modified_base (17)..(17): bicyclic nucleic acid (BNA)
  source: /note="3' tri-ethylene glycol (TEG)"
ctccaacaucaaggaag

SEQ ID NO: 21682 - DNA, 29 bp, Artificial Sequence
  source: /note="Description of Artificial Sequence: Synthetic oligonucleotide"
  source: /note="Description of Combined DNA/RNA Molecule: Synthetic oligonucleotide"
  source: /note="DNA/RNA"
  modified_base (1)..(1): bicyclic nucleic acid (BNA)
  modified_base (2)..(2): 5-methyl bicyclic nucleic acid
  modified_base (3)..(3): 5-methyl modified nucleotide
  modified_base (6)..(6): 5-methyl modified nucleotide
  modified_base (9)..(9): 5-methyl modified nucleotide
  modified_base (21)..(21): 5-methyl modified nucleotide
  modified_base (26)..(26): 5-methyl modified nucleotide
  modified_base (28)..(28): bicyclic nucleic acid (BNA)
  modified_base (29)..(29): bicyclic nucleic acid (BNA)
  source: /note="3' tri-ethylene glycol (TEG)"
tccaacaucaaggaagauggcauuucuag

SEQ ID NO: 21683 - DNA, 28 bp, Artificial Sequence
  source: /note="Description of Artificial Sequence: Synthetic oligonucleotide"
  source: /note="Description of Combined DNA/RNA Molecule: Synthetic oligonucleotide"
  source: /note="DNA/RNA"
  modified_base (1)..(1): bicyclic nucleic acid (BNA)
  modified_base (2)..(2): 5-methyl bicyclic nucleic acid
  modified_base (3)..(3): 5-methyl modified nucleotide
  modified_base (6)..(6): 5-methyl modified nucleotide
  modified_base (9)..(9): 5-methyl modified nucleotide
  modified_base (21)..(21): 5-methyl modified nucleotide
  modified_base (26)..(26): 5-methyl modified nucleotide
  modified_base (27)..(27): bicyclic nucleic acid (BNA)
  modified_base (28)..(28): bicyclic nucleic acid (BNA)
  source: /note="3' tri-ethylene glycol (TEG)"
tccaacaucaaggaagauggcauuucta

SEQ ID NO: 21684 - DNA, 27 bp, Artificial Sequence
  source: /note="Description of Artificial Sequence: Synthetic oligonucleotide"
  source: /note="Description of Combined DNA/RNA Molecule: Synthetic oligonucleotide"
  source: /note="DNA/RNA"
  modified_base (1)..(1): bicyclic nucleic acid (BNA)
  modified_base (2)..(2): 5-methyl bicyclic nucleic acid
  modified_base (3)..(3): 5-methyl modified nucleotide
  modified_base (6)..(6): 5-methyl modified nucleotide
  modified_base (9)..(9): 5-methyl modified nucleotide
  modified_base (21)..(21): 5-methyl modified nucleotide
  modified_base (26)..(26): 5-methyl bicyclic nucleic acid
  modified_base (27)..(27): bicyclic nucleic acid (BNA)
  source: /note="3' tri-ethylene glycol (TEG)"
tccaacaucaaggaagauggcauuuct

SEQ ID NO: 21685 - DNA, 26 bp, Artificial Sequence
  source: /note="Description of Artificial Sequence: Synthetic oligonucleotide"
  source: /note="Description of Combined DNA/RNA Molecule: Synthetic oligonucleotide"
  source: /note="DNA/RNA"
  modified_base (1)..(1): bicyclic nucleic acid (BNA)
  modified_base (2)..(2): 5-methyl bicyclic nucleic acid
  modified_base (3)..(3): 5-methyl modified nucleotide
  modified_base (6)..(6): 5-methyl modified nucleotide
  modified_base (9)..(9): 5-methyl modified nucleotide
  modified_base (21)..(21): 5-methyl modified nucleotide
  modified_base (25)..(25): bicyclic nucleic acid (BNA)
  modified_base (26)..(26): 5-methyl bicyclic nucleic acid
  source: /note="3' tri-ethylene glycol (TEG)"
tccaacaucaaggaagauggcauutc

SEQ ID NO: 21686 - DNA, 25 bp, Artificial Sequence
  source: /note="Description of Artificial Sequence: Synthetic oligonucleotide"
  source: /note="Description of Combined DNA/RNA Molecule: Synthetic oligonucleotide"
  source: /note="DNA/RNA"
  modified_base (1)..(1): bicyclic nucleic acid (BNA)
  modified_base (2)..(2): 5-methyl bicyclic nucleic acid
  modified_base (3)..(3): 5-methyl modified nucleotide
  modified_base (6)..(6): 5-methyl modified nucleotide
  modified_base (9)..(9): 5-methyl modified nucleotide
  modified_base (21)..(21): 5-methyl modified nucleotide
  modified_base (24)..(24): bicyclic nucleic acid (BNA)
  modified_base (25)..(25): bicyclic nucleic acid (BNA)
  source: /note="3' tri-ethylene glycol (TEG)"
tccaacaucaaggaagauggcautt

SEQ ID NO: 21687 - DNA, 24 bp, Artificial Sequence
  source: /note="Description of Artificial Sequence: Synthetic oligonucleotide"
  source: /note="Description of Combined DNA/RNA Molecule: Synthetic oligonucleotide"
  source: /note="DNA/RNA"
  modified_base (1)..(1): bicyclic nucleic acid (BNA)
  modified_base (2)..(2): 5-methyl bicyclic nucleic acid
  modified_base (3)..(3): 5-methyl modified nucleotide
  modified_base (6)..(6): 5-methyl modified nucleotide
  modified_base (9)..(9): 5-methyl modified nucleotide
  modified_base (21)..(21): 5-methyl modified nucleotide
  modified_base (23)..(23): bicyclic nucleic acid (BNA)
  modified_base (24)..(24): bicyclic nucleic acid (BNA)
  source: /note="3' tri-ethylene glycol (TEG)"
tccaacaucaaggaagauggcatt

SEQ ID NO: 21688 - DNA, 23 bp, Artificial Sequence
  source: /note="Description of Artificial Sequence: Synthetic oligonucleotide"
  source: /note="Description of Combined DNA/RNA Molecule: Synthetic oligonucleotide"
  source: /note="DNA/RNA"
  modified_base (1)..(1): bicyclic nucleic acid (BNA)
  modified_base (2)..(2): 5-methyl bicyclic nucleic acid
  modified_base (3)..(3): 5-methyl modified nucleotide
  modified_base (6)..(6): 5-methyl modified nucleotide
  modified_base (9)..(9): 5-methyl modified nucleotide
  modified_base (21)..(21): 5-methyl modified nucleotide
  modified_base (22)..(22): bicyclic nucleic acid (BNA)
  modified_base (23)..(23): bicyclic nucleic acid (BNA)
  source: /note="3' tri-ethylene glycol (TEG)"
tccaacaucaaggaagauggcat

SEQ ID NO: 21689 - DNA, 22 bp, Artificial Sequence
  source: /note="Description of Artificial Sequence: Synthetic oligonucleotide"
  source: /note="Description of Combined DNA/RNA Molecule: Synthetic oligonucleotide"
  source: /note="DNA/RNA"
  modified_base (1)..(1): bicyclic nucleic acid (BNA)
  modified_base (2)..(2): 5-methyl bicyclic nucleic acid
  modified_base (3)..(3): 5-methyl modified nucleotide
  modified_base (6)..(6): 5-methyl modified nucleotide
  modified_base (9)..(9): 5-methyl modified nucleotide
  modified_base (21)..(21): 5-methyl bicyclic nucleic acid
  modified_base (22)..(22): bicyclic nucleic acid (BNA)
  source: /note="3' tri-ethylene glycol (TEG)"
tccaacaucaaggaagauggca

SEQ ID NO: 21690 - DNA, 21 bp, Artificial Sequence
  source: /note="Description of Artificial Sequence: Synthetic oligonucleotide"
  source: /note="Description of Combined DNA/RNA Molecule: Synthetic oligonucleotide"
  source: /note="DNA/RNA"
  modified_base (1)..(1): bicyclic nucleic acid (BNA)
  modified_base (2)..(2): 5-methyl bicyclic nucleic acid
  modified_base (3)..(3): 5-methyl modified nucleotide
  modified_base (6)..(6): 5-methyl modified nucleotide
  modified_base (9)..(9): 5-methyl modified nucleotide
  modified_base (20)..(20): bicyclic nucleic acid (BNA)
  modified_base (21)..(21): 5-methyl bicyclic nucleic acid
  source: /note="3' tri-ethylene glycol (TEG)"
tccaacaucaaggaagauggc

SEQ ID NO: 21691 - DNA, 20 bp, Artificial Sequence
  source: /note="Description of Artificial Sequence: Synthetic oligonucleotide"
  source: /note="Description of Combined DNA/RNA Molecule: Synthetic oligonucleotide"
  source: /note="DNA/RNA"
  modified_base (1)..(1): bicyclic nucleic acid (BNA)
  modified_base (2)..(2): 5-methyl bicyclic nucleic acid
  modified_base (3)..(3): 5-methyl modified nucleotide
  modified_base (6)..(6): 5-methyl modified nucleotide
  modified_base (9)..(9): 5-methyl modified nucleotide
  modified_base (19)..(19): bicyclic nucleic acid (BNA)
  modified_base (20)..(20): bicyclic nucleic acid (BNA)
  source: /note="3' tri-ethylene glycol (TEG)"
tccaacaucaaggaagaugg

SEQ ID NO: 21692 - DNA, 19 bp, Artificial Sequence
  source: /note="Description of Artificial Sequence: Synthetic oligonucleotide"
  source: /note="Description of Combined DNA/RNA Molecule: Synthetic oligonucleotide"
  source: /note="DNA/RNA"
  modified_base (1)..(1): bicyclic nucleic acid (BNA)
  modified_base (2)..(2): 5-methyl bicyclic nucleic acid
  modified_base (3)..(3): 5-methyl modified nucleotide
  modified_base (6)..(6): 5-methyl modified nucleotide
  modified_base (9)..(9): 5-methyl modified nucleotide
  modified_base (18)..(18): bicyclic nucleic acid (BNA)
  modified_base (19)..(19): bicyclic nucleic acid (BNA)
  source: /note="3' tri-ethylene glycol (TEG)"
tccaacaucaaggaagatg

SEQ ID NO: 21693 - DNA, 18 bp, Artificial Sequence
  source: /note="Description of Artificial Sequence: Synthetic oligonucleotide"
  source: /note="Description of Combined DNA/RNA Molecule: Synthetic oligonucleotide"
  source: /note="DNA/RNA"
  modified_base (1)..(1): bicyclic nucleic acid (BNA)
  modified_base (2)..(2): 5-methyl bicyclic nucleic acid
  modified_base (3)..(3): 5-methyl modified nucleotide
  modified_base (6)..(6): 5-methyl modified nucleotide
  modified_base (9)..(9): 5-methyl modified nucleotide
  modified_base (17)..(17): bicyclic nucleic acid (BNA)
  modified_base (18)..(18): bicyclic nucleic acid (BNA)
  source: /note="3' tri-ethylene glycol (TEG)"
tccaacaucaaggaagat

SEQ ID NO: 21694 - DNA, 17 bp, Artificial Sequence
  source: /note="Description of Artificial Sequence: Synthetic oligonucleotide"
  source: /note="Description of Combined DNA/RNA Molecule: Synthetic oligonucleotide"
  source: /note="DNA/RNA"
  modified_base (1)..(1): bicyclic nucleic acid (BNA)
  modified_base (2)..(2): 5-methyl bicyclic nucleic acid
  modified_base (3)..(3): 5-methyl modified nucleotide
  modified_base (6)..(6): 5-methyl modified nucleotide
  modified_base (9)..(9): 5-methyl modified nucleotide
  modified_base (16)..(16): bicyclic nucleic acid (BNA)
  modified_base (17)..(17): bicyclic nucleic acid (BNA)
  source: /note="3' tri-ethylene glycol (TEG)"
tccaacaucaaggaaga

SEQ ID NO: 21695 - DNA, 16 bp, Artificial Sequence
  source: /note="Description of Artificial Sequence: Synthetic oligonucleotide"
  source: /note="Description of Combined DNA/RNA Molecule: Synthetic oligonucleotide"
  source: /note="DNA/RNA"
  modified_base (1)..(1): bicyclic nucleic acid (BNA)
  modified_base (2)..(2): 5-methyl bicyclic nucleic acid
  modified_base (3)..(3): 5-methyl modified nucleotide
  modified_base (6)..(6): 5-methyl modified nucleotide
  modified_base (9)..(9): 5-methyl modified nucleotide
  modified_base (15)..(15): bicyclic nucleic acid (BNA)
  modified_base (16)..(16): bicyclic nucleic acid (BNA)
  source: /note="3' tri-ethylene glycol (TEG)"
tccaacaucaaggaag

SEQ ID NO: 21696 - RNA, 28 nt, Artificial Sequence
  source: /note="Description of Artificial Sequence: Synthetic oligonucleotide"
  source: /note="RNA"
  modified_base (1)..(1): 5-methyl bicyclic nucleic acid
  modified_base (2)..(2): 5-methyl bicyclic nucleic acid
  modified_base (5)..(5): 5-methyl modified nucleotide
  modified_base (8)..(8): 5-methyl modified nucleotide
  modified_base (20)..(20): 5-methyl modified nucleotide
  modified_base (25)..(25): 5-methyl modified nucleotide
  modified_base (27)..(27): bicyclic nucleic acid (BNA)
  modified_base (28)..(28): bicyclic nucleic acid (BNA)
  source: /note="3' tri-ethylene glycol (TEG)"
ccaacaucaaggaagauggcauuucuag

SEQ ID NO: 21697 - DNA, 27 bp, Artificial Sequence
  source: /note="Description of Artificial Sequence: Synthetic oligonucleotide"
  source: /note="Description of Combined DNA/RNA Molecule: Synthetic oligonucleotide"
  source: /note="DNA/RNA"
  modified_base (1)..(1): 5-methyl bicyclic nucleic acid
  modified_base (2)..(2): 5-methyl bicyclic nucleic acid
  modified_base (5)..(5): 5-methyl modified nucleotide
  modified_base (8)..(8): 5-methyl modified nucleotide
  modified_base (20)..(20): 5-methyl modified nucleotide
  modified_base (25)..(25): 5-methyl modified nucleotide
  modified_base (26)..(26): bicyclic nucleic acid (BNA)
  modified_base (27)..(27): bicyclic nucleic acid (BNA)
  source: /note="3' tri-ethylene glycol (TEG)"
ccaacaucaaggaagauggcauuucta

SEQ ID NO: 21698 - DNA, 26 bp, Artificial Sequence
  source: /note="Description of Artificial Sequence: Synthetic oligonucleotide"
  source: /note="Description of Combined DNA/RNA Molecule: Synthetic oligonucleotide"
  source: /note="DNA/RNA"
  modified_base (1)..(1): 5-methyl bicyclic nucleic acid
  modified_base (2)..(2): 5-methyl bicyclic nucleic acid
  modified_base (5)..(5): 5-methyl modified nucleotide
  modified_base (8)..(8): 5-methyl modified nucleotide
  modified_base (20)..(20): 5-methyl modified nucleotide
  modified_base (25)..(25): 5-methyl bicyclic nucleic acid
  modified_base (26)..(26): bicyclic nucleic acid (BNA)
  source: /note="3' tri-ethylene glycol (TEG)"
ccaacaucaaggaagauggcauuuct

SEQ ID NO: 21699 - DNA, 25 bp, Artificial Sequence
  source: /note="Description of Artificial Sequence: Synthetic oligonucleotide"
  source: /note="Description of Combined DNA/RNA Molecule: Synthetic oligonucleotide"
  source: /note="DNA/RNA"
  modified_base (1)..(1): 5-methyl bicyclic nucleic acid
  modified_base (2)..(2): 5-methyl bicyclic nucleic acid
  modified_base (5)..(5): 5-methyl modified nucleotide
  modified_base (8)..(8): 5-methyl modified nucleotide
  modified_base (20)..(20): 5-methyl modified nucleotide
  modified_base (24)..(24): bicyclic nucleic acid (BNA)
  modified_base (25)..(25): 5-methyl bicyclic nucleic acid
  source: /note="3' tri-ethylene glycol (TEG)"
ccaacaucaaggaagauggcauutc

SEQ ID NO: 21700 - DNA, 24 bp, Artificial Sequence
  source: /note="Description of Artificial Sequence: Synthetic oligonucleotide"
  source: /note="Description of Combined DNA/RNA Molecule: Synthetic oligonucleotide"
  source: /note="DNA/RNA"
  modified_base (1)..(1): 5-methyl bicyclic nucleic acid
  modified_base (2)..(2): 5-methyl bicyclic nucleic acid
  modified_base (5)..(5): 5-methyl modified nucleotide
  modified_base (8)..(8): 5-methyl modified nucleotide
  modified_base (20)..(20): 5-methyl modified nucleotide
  modified_base (23)..(23): bicyclic nucleic acid (BNA)
  modified_base (24)..(24): bicyclic nucleic acid (BNA)
  source: /note="3' tri-ethylene glycol (TEG)"
ccaacaucaaggaagauggcautt

SEQ ID NO: 21701 - DNA, 23 bp, Artificial Sequence
  source: /note="Description of Artificial Sequence: Synthetic oligonucleotide"
  source: /note="Description of Combined DNA/RNA Molecule: Synthetic oligonucleotide"
  source: /note="DNA/RNA"
  modified_base (1)..(1): 5-methyl bicyclic nucleic acid
  modified_base (2)..(2): 5-methyl bicyclic nucleic acid
  modified_base (5)..(5): 5-methyl modified nucleotide
  modified_base (8)..(8): 5-methyl modified nucleotide
  modified_base (20)..(20): 5-methyl modified nucleotide
  modified_base (22)..(22): bicyclic nucleic acid (BNA)
  modified_base (23)..(23): bicyclic nucleic acid (BNA)
  source: /note="3' tri-ethylene glycol (TEG)"
ccaacaucaaggaagauggcatt

SEQ ID NO: 21702 - DNA, 22 bp, Artificial Sequence
  source: /note="Description of Artificial Sequence: Synthetic oligonucleotide"
  source: /note="Description of Combined DNA/RNA Molecule: Synthetic oligonucleotide"
  source: /note="DNA/RNA"
  modified_base (1)..(1): 5-methyl bicyclic nucleic acid
  modified_base (2)..(2): 5-methyl bicyclic nucleic acid
  modified_base (5)..(5): 5-methyl modified nucleotide
  modified_base (8)..(8): 5-methyl modified nucleotide
  modified_base (20)..(20): 5-methyl modified nucleotide
  modified_base (21)..(21): bicyclic nucleic acid (BNA)
  modified_base (22)..(22): bicyclic nucleic acid (BNA)
  source: /note="3' tri-ethylene glycol (TEG)"
ccaacaucaaggaagauggcat

SEQ ID NO: 21703 - RNA, 21 nt, Artificial Sequence
  source: /note="Description of Artificial Sequence: Synthetic oligonucleotide"
  source: /note="RNA"
  modified_base (1)..(1): 5-methyl bicyclic nucleic acid
  modified_base (2)..(2): 5-methyl bicyclic nucleic acid
  modified_base (5)..(5): 5-methyl modified nucleotide
  modified_base (8)..(8): 5-methyl modified nucleotide
  modified_base (20)..(20): 5-methyl bicyclic nucleic acid
  modified_base (21)..(21): bicyclic nucleic acid (BNA)
  source: /note="3' tri-ethylene glycol (TEG)"
ccaacaucaaggaagauggca

SEQ ID NO: 21704 - RNA, 20 nt, Artificial Sequence
  source: /note="Description of Artificial Sequence: Synthetic oligonucleotide"
  source: /note="RNA"
  modified_base (1)..(1): 5-methyl bicyclic nucleic acid
  modified_base (2)..(2): 5-methyl bicyclic nucleic acid
  modified_base (5)..(5): 5-methyl modified nucleotide
  modified_base (8)..(8): 5-methyl modified nucleotide
  modified_base (19)..(19): bicyclic nucleic acid (BNA)
  modified_base (20)..(20): 5-methyl bicyclic nucleic acid
  source: /note="3' tri-ethylene glycol (TEG)"
ccaacaucaaggaagauggc

SEQ ID NO: 21705 - RNA, 19 nt, Artificial Sequence
  source: /note="Description of Artificial Sequence: Synthetic oligonucleotide"
  source: /note="RNA"
  modified_base (1)..(1): 5-methyl bicyclic nucleic acid
  modified_base (2)..(2): 5-methyl bicyclic nucleic acid
  modified_base (5)..(5): 5-methyl modified nucleotide
  modified_base (8)..(8): 5-methyl modified nucleotide
  modified_base (18)..(18): bicyclic nucleic acid (BNA)
  modified_base (19)..(19): bicyclic nucleic acid (BNA)
  source: /note="3' tri-ethylene glycol (TEG)"
ccaacaucaaggaagaugg

SEQ ID NO: 21706 - DNA, 18 bp, Artificial Sequence
  source: /note="Description of Artificial Sequence: Synthetic oligonucleotide"
  source: /note="Description of Combined DNA/RNA Molecule: Synthetic oligonucleotide"
  source: /note="DNA/RNA"
  modified_base (1)..(1): 5-methyl bicyclic nucleic acid
  modified_base (2)..(2): 5-methyl bicyclic nucleic acid
  modified_base (5)..(5): 5-methyl modified nucleotide
  modified_base (8)..(8): 5-methyl modified nucleotide
  modified_base (17)..(17): bicyclic nucleic acid (BNA)
  modified_base (18)..(18): bicyclic nucleic acid (BNA)
  source: /note="3' tri-ethylene glycol (TEG)"
ccaacaucaaggaagatg

SEQ ID NO: 21707 - DNA, 17 bp, Artificial Sequence
  source: /note="Description of Artificial Sequence: Synthetic oligonucleotide"
  source: /note="Description of Combined DNA/RNA Molecule: Synthetic oligonucleotide"
  source: /note="DNA/RNA"
  modified_base (1)..(1): 5-methyl bicyclic nucleic acid
  modified_base (2)..(2): 5-methyl bicyclic nucleic acid
  modified_base (5)..(5): 5-methyl modified nucleotide
  modified_base (8)..(8): 5-methyl modified nucleotide
  modified_base (16)..(16): bicyclic nucleic acid (BNA)
  modified_base (17)..(17): bicyclic nucleic acid (BNA)
  source: /note="3' tri-ethylene glycol (TEG)"
ccaacaucaaggaagat

SEQ ID NO: 21708 - RNA, 16 nt, Artificial Sequence
  source: /note="Description of Artificial Sequence: Synthetic oligonucleotide"
  source: /note="RNA"
  modified_base (1)..(1): 5-methyl bicyclic nucleic acid
  modified_base (2)..(2): 5-methyl bicyclic nucleic acid
  modified_base (5)..(5): 5-methyl modified nucleotide
  modified_base (8)..(8): 5-methyl modified nucleotide
  modified_base (15)..(15): bicyclic nucleic acid (BNA)
  modified_base (16)..(16): bicyclic nucleic acid (BNA)
  source: /note="3' tri-ethylene glycol (TEG)"
ccaacaucaaggaaga

SEQ ID NO: 21709 - RNA, 15 nt, Artificial Sequence
  source: /note="Description of Artificial Sequence: Synthetic oligonucleotide"
  source: /note="RNA"
  modified_base (1)..(1): 5-methyl bicyclic nucleic acid
  modified_base (2)..(2): 5-methyl bicyclic nucleic acid
  modified_base (5)..(5): 5-methyl modified nucleotide
  modified_base (8)..(8): 5-methyl modified nucleotide
  modified_base (14)..(14): bicyclic nucleic acid (BNA)
  modified_base (15)..(15): bicyclic nucleic acid (BNA)
  source: /note="3' tri-ethylene glycol (TEG)"
ccaacaucaaggaag

SEQ ID NO: 21710 - RNA, 27 nt, Artificial Sequence
  source: /note="Description of Artificial Sequence: Synthetic oligonucleotide"
  source: /note="RNA"
  modified_base (1)..(1): 5-methyl bicyclic nucleic acid
  modified_base (2)..(2): bicyclic nucleic acid (BNA)
  modified_base (4)..(4): 5-methyl modified nucleotide
  modified_base (7)..(7): 5-methyl modified nucleotide
  modified_base (19)..(19): 5-methyl modified nucleotide
  modified_base (24)..(24): 5-methyl modified nucleotide
  modified_base (26)..(26): bicyclic nucleic acid (BNA)
  modified_base (27)..(27): bicyclic nucleic acid (BNA)
  source: /note="3' tri-ethylene glycol (TEG)"
caacaucaaggaagauggcauuucuag

SEQ ID NO: 21711 - DNA, 26 bp, Artificial Sequence
  source: /note="Description of Artificial Sequence: Synthetic oligonucleotide"
  source: /note="Description of Combined DNA/RNA Molecule: Synthetic oligonucleotide"
  source: /note="DNA/RNA"
  modified_base (1)..(1): 5-methyl bicyclic nucleic acid
  modified_base (2)..(2): bicyclic nucleic acid (BNA)
  modified_base (4)..(4): 5-methyl modified nucleotide
  modified_base (7)..(7): 5-methyl modified nucleotide
  modified_base (19)..(19): 5-methyl modified nucleotide
  modified_base (24)..(24): 5-methyl modified nucleotide
  modified_base (25)..(25): bicyclic nucleic acid (BNA)
  modified_base (26)..(26): bicyclic nucleic acid (BNA)
  source: /note="3' tri-ethylene glycol (TEG)"
caacaucaaggaagauggcauuucta

SEQ ID NO: 21712 - DNA, 25 bp, Artificial Sequence
  source: /note="Description of Artificial Sequence: Synthetic oligonucleotide"
  source: /note="Description of Combined DNA/RNA Molecule: Synthetic oligonucleotide"
  source: /note="DNA/RNA"
  modified_base (1)..(1): 5-methyl bicyclic nucleic acid
  modified_base (2)..(2): bicyclic nucleic acid (BNA)
  modified_base (4)..(4): 5-methyl modified nucleotide
  modified_base (7)..(7): 5-methyl modified nucleotide
  modified_base (19)..(19): 5-methyl modified nucleotide
  modified_base (24)..(24): 5-methyl bicyclic nucleic acid
  modified_base (25)..(25): bicyclic nucleic acid (BNA)
  source: /note="3' tri-ethylene glycol (TEG)"
caacaucaaggaagauggcauuuct

SEQ ID NO: 21713 - DNA, 24 bp, Artificial Sequence
  source: /note="Description of Artificial Sequence: Synthetic oligonucleotide"
  source: /note="Description of Combined DNA/RNA Molecule: Synthetic oligonucleotide"
  source: /note="DNA/RNA"
  modified_base (1)..(1): 5-methyl bicyclic nucleic acid
  modified_base (2)..(2): bicyclic nucleic acid (BNA)
  modified_base (4)..(4): 5-methyl modified nucleotide
  modified_base (7)..(7): 5-methyl modified nucleotide
  modified_base (19)..(19): 5-methyl modified nucleotide
  modified_base (23)..(23): bicyclic nucleic acid (BNA)
  modified_base (24)..(24): 5-methyl bicyclic nucleic acid
  source: /note="3' tri-ethylene glycol (TEG)"
caacaucaaggaagauggcauutc

SEQ ID NO: 21714 - DNA, 23 bp, Artificial Sequence
  source: /note="Description of Artificial Sequence: Synthetic oligonucleotide"
  source: /note="Description of Combined DNA/RNA Molecule: Synthetic oligonucleotide"
  source: /note="DNA/RNA"
  modified_base (1)..(1): 5-methyl bicyclic nucleic acid
  modified_base (2)..(2): bicyclic nucleic acid (BNA)
  modified_base (4)..(4): 5-methyl modified nucleotide
  modified_base (7)..(7): 5-methyl modified nucleotide
  modified_base (19)..(19): 5-methyl modified nucleotide
  modified_base (22)..(22): bicyclic nucleic acid (BNA)
  modified_base (23)..(23): bicyclic nucleic acid (BNA)
  source: /note="3' tri-ethylene glycol (TEG)"
caacaucaaggaagauggcautt

SEQ ID NO: 21715 - DNA, 22 bp, Artificial Sequence
  source: /note="Description of Artificial Sequence: Synthetic oligonucleotide"
  source: /note="Description of Combined DNA/RNA Molecule: Synthetic oligonucleotide"
  source: /note="DNA/RNA"
  modified_base (1)..(1): 5-methyl bicyclic nucleic acid
  modified_base (2)..(2): bicyclic nucleic acid (BNA)
  modified_base (4)..(4): 5-methyl modified nucleotide
  modified_base (7)..(7): 5-methyl modified nucleotide
  modified_base (19)..(19): 5-methyl modified nucleotide
  modified_base (21)..(21): bicyclic nucleic acid (BNA)
  modified_base (22)..(22): bicyclic nucleic acid (BNA)
  source: /note="3' tri-ethylene glycol (TEG)"
caacaucaaggaagauggcatt

SEQ ID NO: 21716 - DNA, 21 bp, Artificial Sequence
  source: /note="Description of Artificial Sequence: Synthetic oligonucleotide"
  source: /note="Description of Combined DNA/RNA Molecule: Synthetic oligonucleotide"
  source: /note="DNA/RNA"
  modified_base (1)..(1): 5-methyl bicyclic nucleic acid
  modified_base (2)..(2): bicyclic nucleic acid (BNA)
  modified_base (4)..(4): 5-methyl modified nucleotide
  modified_base (7)..(7): 5-methyl modified nucleotide
  modified_base (19)..(19): 5-methyl modified nucleotide
  modified_base (20)..(20): bicyclic nucleic acid (BNA)
  modified_base (21)..(21): bicyclic nucleic acid (BNA)
  source: /note="3' tri-ethylene glycol (TEG)"
caacaucaaggaagauggcat

SEQ ID NO: 21717 - RNA, 20 nt, Artificial Sequence
  source: /note="Description of Artificial Sequence: Synthetic oligonucleotide"
  source: /note="RNA"
  modified_base (1)..(1): 5-methyl bicyclic nucleic acid
  modified_base (2)..(2): bicyclic nucleic acid (BNA)
  modified_base (4)..(4): 5-methyl modified nucleotide
  modified_base (7)..(7): 5-methyl modified nucleotide
  modified_base (19)..(19): 5-methyl bicyclic nucleic acid
  modified_base (20)..(20): bicyclic nucleic acid (BNA)
  source: /note="3' tri-ethylene glycol (TEG)"
caacaucaaggaagauggca

SEQ ID NO: 21718 - RNA, 19 nt, Artificial Sequence
  source: /note="Description of Artificial Sequence: Synthetic oligonucleotide"
  source: /note="RNA"
  modified_base (1)..(1): 5-methyl bicyclic nucleic acid
  modified_base (2)..(2): bicyclic nucleic acid (BNA)
  modified_base (4)..(4): 5-methyl modified nucleotide
  modified_base (7)..(7): 5-methyl modified nucleotide
  modified_base (18)..(18): bicyclic nucleic acid (BNA)
  modified_base (19)..(19): 5-methyl bicyclic nucleic acid
  source: /note="3' tri-ethylene glycol (TEG)"
caacaucaaggaagauggc

SEQ ID NO: 21719 - RNA, 18 nt, Artificial Sequence
  source: /note="Description of Artificial Sequence: Synthetic oligonucleotide"
  source: /note="RNA"
  modified_base (1)..(1): 5-methyl bicyclic nucleic acid
  modified_base (2)..(2): bicyclic nucleic acid (BNA)
  modified_base (4)..(4): 5-methyl modified nucleotide
  modified_base (7)..(7): 5-methyl modified nucleotide
  modified_base (17)..(17): bicyclic nucleic acid (BNA)
  modified_base (18)..(18): bicyclic nucleic acid (BNA)
  source: /note="3' tri-ethylene glycol (TEG)"
caacaucaaggaagaugg

SEQ ID NO: 21720 - DNA, 17 bp, Artificial Sequence
  source: /note="Description of Artificial Sequence: Synthetic oligonucleotide"
  source: /note="Description of Combined DNA/RNA Molecule: Synthetic oligonucleotide"
  source: /note="DNA/RNA"
  modified_base (1)..(1): 5-methyl bicyclic nucleic acid
  modified_base (2)..(2): bicyclic nucleic acid (BNA)
  modified_base (4)..(4): 5-methyl modified nucleotide
  modified_base (7)..(7): 5-methyl modified nucleotide
  modified_base (16)..(16): bicyclic nucleic acid (BNA)
  modified_base (17)..(17): bicyclic nucleic acid (BNA)
  source: /note="3' tri-ethylene glycol (TEG)"
caacaucaaggaagatg

SEQ ID NO: 21721 - DNA, 16 bp, Artificial Sequence
  source: /note="Description of Artificial Sequence: Synthetic oligonucleotide"
  source: /note="Description of Combined DNA/RNA Molecule: Synthetic oligonucleotide"
  source: /note="DNA/RNA"
  modified_base (1)..(1): 5-methyl bicyclic nucleic acid
  modified_base (2)..(2): bicyclic nucleic acid (BNA)
  modified_base (4)..(4): 5-methyl modified nucleotide
  modified_base (7)..(7): 5-methyl modified nucleotide
  modified_base (15)..(15): bicyclic nucleic acid (BNA)
  modified_base (16)..(16): bicyclic nucleic acid (BNA)
  source: /note="3' tri-ethylene glycol (TEG)"
caacaucaaggaagat

SEQ ID NO: 21722 - RNA, 15 nt, Artificial Sequence
  source: /note="Description of Artificial Sequence: Synthetic oligonucleotide"
  source: /note="RNA"
  modified_base (1)..(1): 5-methyl bicyclic nucleic acid
  modified_base (2)..(2): bicyclic nucleic acid (BNA)
  modified_base (4)..(4): 5-methyl modified nucleotide
  modified_base (7)..(7): 5-methyl modified nucleotide
  modified_base (14)..(14): bicyclic nucleic acid (BNA)
  modified_base (15)..(15): bicyclic nucleic acid (BNA)
  source: /note="3' tri-ethylene glycol (TEG)"
caacaucaaggaaga

SEQ ID NO: 21723 - RNA, 14 nt, Artificial Sequence
  source: /note="Description of Artificial Sequence: Synthetic oligonucleotide"
  source: /note="RNA"
  modified_base (1)..(1): 5-methyl bicyclic nucleic acid
  modified_base (2)..(2): bicyclic nucleic acid (BNA)
  modified_base (4)..(4): 5-methyl modified nucleotide
  modified_base (7)..(7): 5-methyl modified nucleotide
  modified_base (13)..(13): bicyclic nucleic acid (BNA)
  modified_base (14)..(14): bicyclic nucleic acid (BNA)
  source: /note="3' tri-ethylene glycol (TEG)"
caacaucaaggaag

SEQ ID NO: 21724 - RNA, 26 nt, Artificial Sequence
  source: /note="Description of Artificial Sequence: Synthetic oligonucleotide"
  source: /note="RNA"
  modified_base (1)..(1): bicyclic nucleic acid (BNA)
  modified_base (2)..(2): bicyclic nucleic acid (BNA)
  modified_base (3)..(3): 5-methyl modified nucleotide
  modified_base (6)..(6): 5-methyl modified nucleotide
  modified_base (18)..(18): 5-methyl modified nucleotide
  modified_base (23)..(23): 5-methyl modified nucleotide
  modified_base (25)..(25): bicyclic nucleic acid (BNA)
  modified_base (26)..(26): bicyclic nucleic acid (BNA)
  source: /note="3' tri-ethylene glycol (TEG)"
aacaucaaggaagauggcauuucuag

SEQ ID NO: 21725 - DNA, 25 bp, Artificial Sequence
  source: /note="Description of Artificial Sequence: Synthetic oligonucleotide"
  source: /note="Description of Combined DNA/RNA Molecule: Synthetic oligonucleotide"
  source: /note="DNA/RNA"
  modified_base (1)..(1): bicyclic nucleic acid (BNA)
  modified_base (2)..(2): bicyclic nucleic acid (BNA)
  modified_base (3)..(3): 5-methyl modified nucleotide
  modified_base (6)..(6): 5-methyl modified nucleotide
  modified_base (18)..(18): 5-methyl modified nucleotide
  modified_base (23)..(23): 5-methyl modified nucleotide
  modified_base (24)..(24): bicyclic nucleic acid (BNA)
  modified_base (25)..(25): bicyclic nucleic acid (BNA)
  source: /note="3' tri-ethylene glycol (TEG)"
aacaucaaggaagauggcauuucta

SEQ ID NO: 21726 - DNA, 24 bp, Artificial Sequence
  source: /note="Description of Artificial Sequence: Synthetic oligonucleotide"
  source: /note="Description of Combined DNA/RNA Molecule: Synthetic oligonucleotide"
  source: /note="DNA/RNA"
  modified_base (1)..(1): bicyclic nucleic acid (BNA)
  modified_base (2)..(2): bicyclic nucleic acid (BNA)
  modified_base (3)..(3): 5-methyl modified nucleotide
  modified_base (6)..(6): 5-methyl modified nucleotide
  modified_base (18)..(18): 5-methyl modified nucleotide
  modified_base (23)..(23): 5-methyl bicyclic nucleic acid
  modified_base (24)..(24): bicyclic nucleic acid (BNA)
  source: /note="3' tri-ethylene glycol (TEG)"
aacaucaaggaagauggcauuuct

SEQ ID NO: 21727 - DNA, 23 bp, Artificial Sequence
  source: /note="Description of Artificial Sequence: Synthetic oligonucleotide"
  source: /note="Description of Combined DNA/RNA Molecule: Synthetic oligonucleotide"
  source: /note="DNA/RNA"
  modified_base (1)..(1): bicyclic nucleic acid (BNA)
  modified_base (2)..(2): bicyclic nucleic acid (BNA)
  modified_base (3)..(3): 5-methyl modified nucleotide
  modified_base (6)..(6): 5-methyl modified nucleotide
  modified_base (18)..(18): 5-methyl modified nucleotide
  modified_base (22)..(22): bicyclic nucleic acid (BNA)
  modified_base (23)..(23): 5-methyl bicyclic nucleic acid
  source: /note="3' tri-ethylene glycol (TEG)"
aacaucaaggaagauggcauutc

SEQ ID NO: 21728 - DNA, 22 bp, Artificial Sequence
  source: /note="Description of Artificial Sequence: Synthetic oligonucleotide"
  source: /note="Description of Combined DNA/RNA Molecule: Synthetic oligonucleotide"
  source: /note="DNA/RNA"
  modified_base (1)..(1): bicyclic nucleic acid (BNA)
  modified_base (2)..(2): bicyclic nucleic acid (BNA)
  modified_base (3)..(3): 5-methyl modified nucleotide
  modified_base (6)..(6): 5-methyl modified nucleotide
  modified_base (18)..(18): 5-methyl modified nucleotide
  modified_base (21)..(21): bicyclic nucleic acid (BNA)
  modified_base (22)..(22): bicyclic nucleic acid (BNA)
  source: /note="3' tri-ethylene glycol (TEG)"
aacaucaaggaagauggcautt

SEQ ID NO: 21729 - DNA, 21 bp, Artificial Sequence
  source: /note="Description of Artificial Sequence: Synthetic oligonucleotide"
  source: /note="Description of Combined DNA/RNA Molecule: Synthetic oligonucleotide"
  source: /note="DNA/RNA"
  modified_base (1)..(1): bicyclic nucleic acid (BNA)
  modified_base (2)..(2): bicyclic nucleic acid (BNA)
  modified_base (3)..(3): 5-methyl modified nucleotide
  modified_base (6)..(6): 5-methyl modified nucleotide
  modified_base (18)..(18): 5-methyl modified nucleotide
  modified_base (20)..(20): bicyclic nucleic acid (BNA)
  modified_base (21)..(21): bicyclic nucleic acid (BNA)
  source: /note="3' tri-ethylene glycol (TEG)"
aacaucaaggaagauggcatt

SEQ ID NO: 21730 - DNA, 20 bp, Artificial Sequence
  source: /note="Description of Artificial Sequence: Synthetic oligonucleotide"
  source: /note="Description of Combined DNA/RNA Molecule: Synthetic oligonucleotide"
  source: /note="DNA/RNA"
  modified_base (1)..(1): bicyclic nucleic acid (BNA)
  modified_base (2)..(2): bicyclic nucleic acid (BNA)
  modified_base (3)..(3): 5-methyl modified nucleotide
  modified_base (6)..(6): 5-methyl modified nucleotide
  modified_base (18)..(18): 5-methyl modified nucleotide
  modified_base (19)..(19): bicyclic nucleic acid (BNA)
  modified_base (20)..(20): bicyclic nucleic acid (BNA)
  source: /note="3' tri-ethylene glycol (TEG)"
aacaucaaggaagauggcat

SEQ ID NO: 21731 - RNA, 19 nt, Artificial Sequence
  source: /note="Description of Artificial Sequence: Synthetic oligonucleotide"
  source: /note="RNA"
  modified_base (1)..(1): bicyclic nucleic acid (BNA)
  modified_base (2)..(2): bicyclic nucleic acid (BNA)
  modified_base (3)..(3): 5-methyl modified nucleotide
  modified_base (6)..(6): 5-methyl modified nucleotide
  modified_base (18)..(18): 5-methyl bicyclic nucleic acid
  modified_base (19)..(19): bicyclic nucleic acid (BNA)
  source: /note="3' tri-ethylene glycol (TEG)"
aacaucaaggaagauggca

SEQ ID NO: 21732 - RNA, 18 nt, Artificial Sequence
  source: /note="Description of Artificial Sequence: Synthetic oligonucleotide"
  source: /note="RNA"
  modified_base (1)..(1): bicyclic nucleic acid (BNA)
  modified_base (2)..(2): bicyclic nucleic acid (BNA)
  modified_base (3)..(3): 5-methyl modified nucleotide
  modified_base (6)..(6): 5-methyl modified nucleotide
  modified_base (17)..(17): bicyclic nucleic acid (BNA)
  modified_base (18)..(18): 5-methyl bicyclic nucleic acid
  source: /note="3' tri-ethylene glycol (TEG)"
aacaucaaggaagauggc

SEQ ID NO: 21733 - RNA, 17 nt, Artificial Sequence
  source: /note="Description of Artificial Sequence: Synthetic oligonucleotide"
  source: /note="RNA"
  modified_base (1)..(1): bicyclic nucleic acid (BNA)
  modified_base (2)..(2): bicyclic nucleic acid (BNA)
  modified_base (3)..(3): 5-methyl modified nucleotide
  modified_base (6)..(6): 5-methyl modified nucleotide
  modified_base (16)..(16): bicyclic nucleic acid (BNA)
  modified_base (17)..(17): bicyclic nucleic acid (BNA)
  source: /note="3' tri-ethylene glycol (TEG)"
aacaucaaggaagaugg

SEQ ID NO: 21734 - DNA, 16 bp, Artificial Sequence
  source: /note="Description of Artificial Sequence: Synthetic oligonucleotide"
  source: /note="Description of Combined DNA/RNA Molecule: Synthetic oligonucleotide"
  source: /note="DNA/RNA"
  modified_base (1)..(1): bicyclic nucleic acid (BNA)
  modified_base (2)..(2): bicyclic nucleic acid (BNA)
  modified_base (3)..(3): 5-methyl modified nucleotide
  modified_base (6)..(6): 5-methyl modified nucleotide
  modified_base (15)..(15): bicyclic nucleic acid (BNA)
  modified_base (16)..(16): bicyclic nucleic acid (BNA)
  source: /note="3' tri-ethylene glycol (TEG)"
aacaucaaggaagatg

SEQ ID NO: 21735 - DNA, 15 bp, Artificial Sequence
  source: /note="Description of Artificial Sequence: Synthetic oligonucleotide"
  source: /note="Description of Combined DNA/RNA Molecule: Synthetic oligonucleotide"
  source: /note="DNA/RNA"
  modified_base (1)..(1): bicyclic nucleic acid (BNA)
  modified_base (2)..(2): bicyclic nucleic acid (BNA)
  modified_base (3)..(3): 5-methyl modified nucleotide
  modified_base (6)..(6): 5-methyl modified nucleotide
  modified_base (14)..(14): bicyclic nucleic acid (BNA)
  modified_base (15)..(15): bicyclic nucleic acid (BNA)
  source: /note="3' tri-ethylene glycol (TEG)"
aacaucaaggaagat

SEQ ID NO: 21736 - RNA, 14 nt, Artificial Sequence
  source: /note="Description of Artificial Sequence: Synthetic oligonucleotide"
  source: /note="RNA"
  modified_base (1)..(1): bicyclic nucleic acid (BNA)
  modified_base (2)..(2): bicyclic nucleic acid (BNA)
  modified_base (3)..(3): 5-methyl modified nucleotide
  modified_base (6)..(6): 5-methyl modified nucleotide
  modified_base (13)..(13): bicyclic nucleic acid (BNA)
  modified_base (14)..(14): bicyclic nucleic acid (BNA)
  source: /note="3' tri-ethylene glycol (TEG)"
aacaucaaggaaga

SEQ ID NO: 21737 - RNA, 13 nt, Artificial Sequence
  source: /note="Description of Artificial Sequence: Synthetic oligonucleotide"
  source: /note="RNA"
  modified_base (1)..(1): bicyclic nucleic acid (BNA)
  modified_base (2)..(2): bicyclic nucleic acid (BNA)
  modified_base (3)..(3): 5-methyl modified nucleotide
  modified_base (6)..(6): 5-methyl modified nucleotide
  modified_base (12)..(12): bicyclic nucleic acid (BNA)
  modified_base (13)..(13): bicyclic nucleic acid (BNA)
  source: /note="3' tri-ethylene glycol (TEG)"
aacaucaaggaag

SEQ ID NO: 21738 - RNA, 25 nt, Artificial Sequence
  source: /note="Description of Artificial Sequence: Synthetic oligonucleotide"
  source: /note="RNA"
  modified_base (1)..(1): bicyclic nucleic acid (BNA)
  modified_base (2)..(2): 5-methyl bicyclic nucleic acid
  modified_base (5)..(5): 5-methyl modified nucleotide
  modified_base (17)..(17): 5-methyl modified nucleotide
  modified_base (22)..(22): 5-methyl modified nucleotide
  modified_base (24)..(24): bicyclic nucleic acid (BNA)
  modified_base (25)..(25): bicyclic nucleic acid (BNA)
  source: /note="3' tri-ethylene glycol (TEG)"
acaucaaggaagauggcauuucuag

SEQ ID NO: 21739 - DNA, 24 bp, Artificial Sequence
  source: /note="Description of Artificial Sequence: Synthetic oligonucleotide"
  source: /note="Description of Combined DNA/RNA Molecule: Synthetic oligonucleotide"
  source: /note="DNA/RNA"
  modified_base (1)..(1): bicyclic nucleic acid (BNA)
  modified_base (2)..(2): 5-methyl bicyclic nucleic acid
  modified_base (5)..(5): 5-methyl modified nucleotide
  modified_base (17)..(17): 5-methyl modified nucleotide
  modified_base (22)..(22): 5-methyl modified nucleotide
  modified_base (23)..(23): bicyclic nucleic acid (BNA)
  modified_base (24)..(24): bicyclic nucleic acid (BNA)
  source: /note="3' tri-ethylene glycol (TEG)"
acaucaaggaagauggcauuucta

SEQ ID NO: 21740 - DNA, 23 bp, Artificial Sequence
  source: /note="Description of Artificial Sequence: Synthetic oligonucleotide"
  source: /note="Description of Combined DNA/RNA Molecule: Synthetic oligonucleotide"
  source: /note="DNA/RNA"
  modified_base (1)..(1): bicyclic nucleic acid (BNA)
  modified_base (2)..(2): 5-methyl bicyclic nucleic acid
  modified_base (5)..(5): 5-methyl modified nucleotide
  modified_base (17)..(17): 5-methyl modified nucleotide
  modified_base (22)..(22): 5-methyl bicyclic nucleic acid
  modified_base (23)..(23): bicyclic nucleic acid (BNA)
  source: /note="3' tri-ethylene glycol (TEG)"
acaucaaggaagauggcauuuct

SEQ ID NO: 21741 - DNA, 22 bp, Artificial Sequence
  source: /note="Description of Artificial Sequence: Synthetic oligonucleotide"
  source: /note="Description of Combined DNA/RNA Molecule: Synthetic oligonucleotide"
  source: /note="DNA/RNA"
  modified_base (1)..(1): bicyclic nucleic acid (BNA)
  modified_base (2)..(2): 5-methyl bicyclic nucleic acid
  modified_base (5)..(5): 5-methyl modified nucleotide
  modified_base (17)..(17): 5-methyl modified nucleotide
  modified_base (21)..(21): bicyclic nucleic acid (BNA)
  modified_base (22)..(22): 5-methyl bicyclic nucleic acid
  source: /note="3' tri-ethylene glycol (TEG)"
acaucaaggaagauggcauutc

SEQ ID NO: 21742 - DNA, 21 bp, Artificial Sequence
  source: /note="Description of Artificial Sequence: Synthetic oligonucleotide"
  source: /note="Description of Combined DNA/RNA Molecule: Synthetic oligonucleotide"
  source: /note="DNA/RNA"
  modified_base (1)..(1): bicyclic nucleic acid (BNA)
  modified_base (2)..(2): 5-methyl bicyclic nucleic acid
  modified_base (5)..(5): 5-methyl modified nucleotide
  modified_base (17)..(17): 5-methyl modified nucleotide
  modified_base (20)..(20): bicyclic nucleic acid (BNA)
  modified_base (21)..(21): bicyclic nucleic acid (BNA)
  source: /note="3' tri-ethylene glycol (TEG)"
acaucaaggaagauggcautt

SEQ ID NO: 21743 - DNA, 20 bp, Artificial Sequence
  source: /note="Description of Artificial Sequence: Synthetic oligonucleotide"
  source: /note="Description of Combined DNA/RNA Molecule: Synthetic oligonucleotide"
  source: /note="DNA/RNA"
  modified_base (1)..(1): bicyclic nucleic acid (BNA)
  modified_base (2)..(2): 5-methyl bicyclic nucleic acid
  modified_base (5)..(5): 5-methyl modified nucleotide
  modified_base (17)..(17): 5-methyl modified nucleotide
  modified_base (19)..(19): bicyclic nucleic acid (BNA)
  modified_base (20)..(20): bicyclic nucleic acid (BNA)
  source: /note="3' tri-ethylene glycol (TEG)"
acaucaaggaagauggcatt

SEQ ID NO: 21744 - DNA, 19 bp, Artificial Sequence
  source: /note="Description of Artificial Sequence: Synthetic oligonucleotide"
  source: /note="Description of Combined DNA/RNA Molecule: Synthetic oligonucleotide"
  source: /note="DNA/RNA"
  modified_base (1)..(1): bicyclic nucleic acid (BNA)
  modified_base (2)..(2): 5-methyl bicyclic nucleic acid
  modified_base (5)..(5): 5-methyl modified nucleotide
  modified_base (17)..(17): 5-methyl modified nucleotide
  modified_base (18)..(18): bicyclic nucleic acid (BNA)
  modified_base (19)..(19): bicyclic nucleic acid (BNA)
  source: /note="3' tri-ethylene glycol (TEG)"
acaucaaggaagauggcat

SEQ ID NO: 21745 - RNA, 18 nt, Artificial Sequence
  source: /note="Description of Artificial Sequence: Synthetic oligonucleotide"
  source: /note="RNA"
  modified_base (1)..(1): bicyclic nucleic acid (BNA)
  modified_base (2)..(2): 5-methyl bicyclic nucleic acid
  modified_base (5)..(5): 5-methyl modified nucleotide
  modified_base (17)..(17): 5-methyl bicyclic nucleic acid
  modified_base (18)..(18): bicyclic nucleic acid (BNA)
  source: /note="3' tri-ethylene glycol (TEG)"
acaucaaggaagauggca

SEQ ID NO: 21746 - RNA, 17 nt, Artificial Sequence
  source: /note="Description of Artificial Sequence: Synthetic oligonucleotide"
  source: /note="RNA"
  modified_base (1)..(1): bicyclic nucleic acid (BNA)
  modified_base (2)..(2): 5-methyl bicyclic nucleic acid
  modified_base (5)..(5): 5-methyl modified nucleotide
  modified_base (16)..(16): bicyclic nucleic acid (BNA)
  modified_base (17)..(17): 5-methyl bicyclic nucleic acid
  source: /note="3' tri-ethylene glycol (TEG)"
acaucaaggaagauggc

SEQ ID NO: 21747 - RNA, 16 nt, Artificial Sequence
  source: /note="Description of Artificial Sequence: Synthetic oligonucleotide"
  source: /note="RNA"
  modified_base (1)..(1): bicyclic nucleic acid (BNA)
  modified_base (2)..(2): 5-methyl bicyclic nucleic acid
  modified_base (5)..(5): 5-methyl modified nucleotide
  modified_base (15)..(15): bicyclic nucleic acid (BNA)
  modified_base (16)..(16): bicyclic nucleic acid (BNA)
  source: /note="3' tri-ethylene glycol (TEG)"
acaucaaggaagaugg

SEQ ID NO: 21748 - DNA, 15 bp, Artificial Sequence
  source: /note="Description of Artificial Sequence: Synthetic oligonucleotide"
  source: /note="Description of Combined DNA/RNA Molecule: Synthetic oligonucleotide"
  source: /note="DNA/RNA"
  modified_base (1)..(1): bicyclic nucleic acid (BNA)
  modified_base (2)..(2): 5-methyl bicyclic nucleic acid
  modified_base (5)..(5): 5-methyl modified nucleotide
  modified_base (14)..(14): bicyclic nucleic acid (BNA)
  modified_base (15)..(15): bicyclic nucleic acid (BNA)
  source: /note="3' tri-ethylene glycol (TEG)"
acaucaaggaagatg

SEQ ID NO: 21749 - DNA, 14 bp, Artificial Sequence
  source: /note="Description of Artificial Sequence: Synthetic oligonucleotide"
  source: /note="Description of Combined DNA/RNA Molecule: Synthetic oligonucleotide"
  source: /note="DNA/RNA"
  modified_base (1)..(1): bicyclic nucleic acid (BNA)
  modified_base (2)..(2): 5-methyl bicyclic nucleic acid
  modified_base (5)..(5): 5-methyl modified nucleotide
  modified_base (13)..(13): bicyclic nucleic acid (BNA)
  modified_base (14)..(14): bicyclic nucleic acid (BNA)
  source: /note="3' tri-ethylene glycol (TEG)"
acaucaaggaagat

SEQ ID NO: 21750 - RNA, 13 nt, Artificial Sequence
  source: /note="Description of Artificial Sequence: Synthetic oligonucleotide"
  source: /note="RNA"
  modified_base (1)..(1): bicyclic nucleic acid (BNA)
  modified_base (2)..(2): 5-methyl bicyclic nucleic acid
  modified_base (5)..(5): 5-methyl modified nucleotide
  modified_base (12)..(12): bicyclic nucleic acid (BNA)
  modified_base (13)..(13): bicyclic nucleic acid (BNA)
  source: /note="3' tri-ethylene glycol (TEG)"
acaucaaggaaga

SEQ ID NO: 21751 - RNA, 12 nt, Artificial Sequence
  source: /note="Description of Artificial Sequence: Synthetic oligonucleotide"
  source: /note="RNA"
  modified_base (1)..(1): bicyclic nucleic acid (BNA)
  modified_base (2)..(2): 5-methyl bicyclic nucleic acid
  modified_base (5)..(5): 5-methyl modified nucleotide
  modified_base (11)..(11): bicyclic nucleic acid (BNA)
  modified_base (12)..(12): bicyclic nucleic acid (BNA)
  source: /note="3' tri-ethylene glycol (TEG)"
acaucaaggaag

SEQ ID NO: 21752 - RNA, 24 nt, Artificial Sequence
  source: /note="Description of Artificial Sequence: Synthetic oligonucleotide"
  source: /note="RNA"
  modified_base (1)..(1): 5-methyl bicyclic nucleic acid
  modified_base (2)..(2): bicyclic nucleic acid (BNA)
  modified_base (4)..(4): 5-methyl modified nucleotide
  modified_base (16)..(16): 5-methyl modified nucleotide
  modified_base (21)..(21): 5-methyl modified nucleotide
  modified_base (23)..(23): bicyclic nucleic acid (BNA)
  modified_base (24)..(24): bicyclic nucleic acid (BNA)
  source: /note="3' tri-ethylene glycol (TEG)"
caucaaggaagauggcauuucuag

SEQ ID NO: 21753 - DNA, 23 bp, Artificial Sequence
  source: /note="Description of Artificial Sequence: Synthetic oligonucleotide"
  source: /note="Description of Combined DNA/RNA Molecule: Synthetic oligonucleotide"
  source: /note="DNA/RNA"
  modified_base (1)..(1): 5-methyl bicyclic nucleic acid
  modified_base (2)..(2): bicyclic nucleic acid (BNA)
  modified_base (4)..(4): 5-methyl modified nucleotide
  modified_base (16)..(16): 5-methyl modified nucleotide
  modified_base (21)..(21): 5-methyl modified nucleotide
  modified_base (22)..(22): bicyclic nucleic acid (BNA)
  modified_base (23)..(23): bicyclic nucleic acid (BNA)
  source: /note="3' tri-ethylene glycol (TEG)"
caucaaggaagauggcauuucta

SEQ ID NO: 21754 - DNA, 22 bp, Artificial Sequence
  source: /note="Description of Artificial Sequence: Synthetic oligonucleotide"
  source: /note="Description of Combined DNA/RNA Molecule: Synthetic oligonucleotide"
  source: /note="DNA/RNA"
  modified_base (1)..(1): 5-methyl bicyclic nucleic acid
  modified_base (2)..(2): bicyclic nucleic acid (BNA)
  modified_base (4)..(4): 5-methyl modified nucleotide
  modified_base (16)..(16): 5-methyl modified nucleotide
  modified_base (21)..(21): 5-methyl bicyclic nucleic acid
  modified_base (22)..(22): bicyclic nucleic acid (BNA)
  source: /note="3' tri-ethylene glycol (TEG)"
caucaaggaagauggcauuuct

SEQ ID NO: 21755 - DNA, 21 bp, Artificial Sequence
  source: /note="Description of Artificial Sequence: Synthetic oligonucleotide"
  source: /note="Description of Combined DNA/RNA Molecule: Synthetic oligonucleotide"
  source: /note="DNA/RNA"
  modified_base (1)..(1): 5-methyl bicyclic nucleic acid
  modified_base (2)..(2): bicyclic nucleic acid (BNA)
  modified_base (4)..(4): 5-methyl modified nucleotide
  modified_base (16)..(16): 5-methyl modified nucleotide
  modified_base (20)..(20): bicyclic nucleic acid (BNA)
  modified_base (21)..(21): 5-methyl bicyclic nucleic acid
  source: /note="3' tri-ethylene glycol (TEG)"
caucaaggaagauggcauutc

SEQ ID NO: 21756 - DNA, 20 bp, Artificial Sequence
  source: /note="Description of Artificial Sequence: Synthetic oligonucleotide"
  source: /note="Description of Combined DNA/RNA Molecule: Synthetic oligonucleotide"
  source: /note="DNA/RNA"
  modified_base (1)..(1): 5-methyl bicyclic nucleic acid
  modified_base (2)..(2): bicyclic nucleic acid (BNA)
  modified_base (4)..(4): 5-methyl modified nucleotide
  modified_base (16)..(16): 5-methyl modified nucleotide
  modified_base (19)..(19): bicyclic nucleic acid (BNA)
  modified_base (20)..(20): bicyclic nucleic acid (BNA)
  source: /note="3' tri-ethylene glycol (TEG)"
caucaaggaagauggcautt

SEQ ID NO: 21757 - DNA, 19 bp, Artificial Sequence
  source: /note="Description of Artificial Sequence: Synthetic oligonucleotide"
  source: /note="Description of Combined DNA/RNA Molecule: Synthetic oligonucleotide"
  source: /note="DNA/RNA"
  modified_base (1)..(1): 5-methyl bicyclic nucleic acid
  modified_base (2)..(2): bicyclic nucleic acid (BNA)
  modified_base (4)..(4): 5-methyl modified nucleotide
  modified_base (16)..(16): 5-methyl modified nucleotide
  modified_base (18)..(18): bicyclic nucleic acid (BNA)
  modified_base (19)..(19): bicyclic nucleic acid (BNA)
  source: /note="3' tri-ethylene glycol (TEG)"
caucaaggaagauggcatt

SEQ ID NO: 21758 - DNA, 18 bp, Artificial Sequence
  source: /note="Description of Artificial Sequence: Synthetic oligonucleotide"
  source: /note="Description of Combined DNA/RNA Molecule: Synthetic oligonucleotide"
  source: /note="DNA/RNA"
  modified_base (1)..(1): 5-methyl bicyclic nucleic acid
  modified_base (2)..(2): bicyclic nucleic acid (BNA)
  modified_base (4)..(4): 5-methyl modified nucleotide
  modified_base (16)..(16): 5-methyl modified nucleotide
  modified_base (17)..(17): bicyclic nucleic acid (BNA)
  modified_base (18)..(18): bicyclic nucleic acid (BNA)
  source: /note="3' tri-ethylene glycol (TEG)"
caucaaggaagauggcat

SEQ ID NO: 21759 - RNA, 17 nt, Artificial Sequence
  source: /note="Description of Artificial Sequence: Synthetic oligonucleotide"
  source: /note="RNA"
  modified_base (1)..(1): 5-methyl bicyclic nucleic acid
  modified_base (2)..(2): bicyclic nucleic acid (BNA)
  modified_base (4)..(4): 5-methyl modified nucleotide
  modified_base (16)..(16): 5-methyl bicyclic nucleic acid
  modified_base (17)..(17): bicyclic nucleic acid (BNA)
  source: /note="3' tri-ethylene glycol (TEG)"
caucaaggaagauggca

SEQ ID NO: 21760 - RNA, 16 nt, Artificial Sequence
  source: /note="Description of Artificial Sequence: Synthetic oligonucleotide"
  source: /note="RNA"
  modified_base (1)..(1): 5-methyl bicyclic nucleic acid
  modified_base (2)..(2): bicyclic nucleic acid (BNA)
  modified_base (4)..(4): 5-methyl modified nucleotide
  modified_base (15)..(15): bicyclic nucleic acid (BNA)
  modified_base (16)..(16): 5-methyl bicyclic nucleic acid
  source: /note="3' tri-ethylene glycol (TEG)"
caucaaggaagauggc

SEQ ID NO: 21761 - RNA, 15 nt, Artificial Sequence
  source: /note="Description of Artificial Sequence: Synthetic oligonucleotide"
  source: /note="RNA"
  modified_base (1)..(1): 5-methyl bicyclic nucleic acid
  modified_base (2)..(2): bicyclic nucleic acid (BNA)
  modified_base (4)..(4): 5-methyl modified nucleotide
  modified_base (14)..(14): bicyclic nucleic acid (BNA)
  modified_base (15)..(15): bicyclic nucleic acid (BNA)
  source: /note="3' tri-ethylene glycol (TEG)"
caucaaggaagaugg

SEQ ID NO: 21762 - DNA, 14 bp, Artificial Sequence
  source: /note="Description of Artificial Sequence: Synthetic oligonucleotide"
  source: /note="Description of Combined DNA/RNA Molecule: Synthetic oligonucleotide"
  source: /note="DNA/RNA"
  modified_base (1)..(1): 5-methyl bicyclic nucleic acid
  modified_base (2)..(2): bicyclic nucleic acid (BNA)
  modified_base (4)..(4): 5-methyl modified nucleotide
  modified_base (13)..(13): bicyclic nucleic acid (BNA)
  modified_base (14)..(14): bicyclic nucleic acid (BNA)
  source: /note="3' tri-ethylene glycol (TEG)"
caucaaggaagatg

SEQ ID NO: 21763 - DNA, 13 bp, Artificial Sequence
  source: /note="Description of Artificial Sequence: Synthetic oligonucleotide"
  source: /note="Description of Combined DNA/RNA Molecule: Synthetic oligonucleotide"
  source: /note="DNA/RNA"
  modified_base (1)..(1): 5-methyl bicyclic nucleic acid
  modified_base (2)..(2): bicyclic nucleic acid (BNA)
  modified_base (4)..(4): 5-methyl modified nucleotide
  modified_base (12)..(12): bicyclic nucleic acid (BNA)
  modified_base (13)..(13): bicyclic nucleic acid (BNA)
  source: /note="3' tri-ethylene glycol (TEG)"
caucaaggaagat

SEQ ID NO: 21764 - RNA, 12 nt, Artificial Sequence
  source: /note="Description of Artificial Sequence: Synthetic oligonucleotide"
  source: /note="RNA"
  modified_base (1)..(1): 5-methyl bicyclic nucleic acid
  modified_base (2)..(2): bicyclic nucleic acid (BNA)
  modified_base (4)..(4): 5-methyl modified nucleotide
  modified_base (11)..(11): bicyclic nucleic acid (BNA)
  modified_base (12)..(12): bicyclic nucleic acid (BNA)
  source: /note="3' tri-ethylene glycol (TEG)"
caucaaggaaga

SEQ ID NO: 21765 - RNA, 11 nt, Artificial Sequence
  source: /note="Description of Artificial Sequence: Synthetic oligonucleotide"
  source: /note="RNA"
  modified_base (1)..(1): 5-methyl bicyclic nucleic acid
  modified_base (2)..(2): bicyclic nucleic acid (BNA)
  modified_base (4)..(4): 5-methyl modified nucleotide
  modified_base (10)..(10): bicyclic nucleic acid (BNA)
  modified_base (11)..(11): bicyclic nucleic acid (BNA)
  source: /note="3' tri-ethylene glycol (TEG)"
caucaaggaag

SEQ ID NO: 21766 - DNA, 23 bp, Artificial Sequence
  source: /note="Description of Artificial Sequence: Synthetic oligonucleotide"
  source: /note="Description of Combined DNA/RNA Molecule: Synthetic oligonucleotide"
  source: /note="DNA/RNA"
  modified_base (1)..(1): bicyclic nucleic acid (BNA)
  modified_base (2)..(2): bicyclic nucleic acid (BNA)
  modified_base (3)..(3): 5-methyl modified nucleotide
  modified_base (15)..(15): 5-methyl modified nucleotide
  modified_base (20)..(20): 5-methyl modified nucleotide
  modified_base (22)..(22): bicyclic nucleic acid (BNA)
  modified_base (23)..(23): bicyclic nucleic acid (BNA)
  source: /note="3' tri-ethylene glycol (TEG)"
atcaaggaagauggcauuucuag

SEQ ID NO: 21767 - DNA, 22 bp, Artificial Sequence
  source: /note="Description of Artificial Sequence: Synthetic oligonucleotide"
  source: /note="Description of Combined DNA/RNA Molecule: Synthetic oligonucleotide"
  source: /note="DNA/RNA"
  modified_base (1)..(1): bicyclic nucleic acid (BNA)
  modified_base (2)..(2): bicyclic nucleic acid (BNA)
  modified_base (3)..(3): 5-methyl modified nucleotide
  modified_base (15)..(15): 5-methyl modified nucleotide
  modified_base (20)..(20): 5-methyl modified nucleotide
  modified_base (21)..(21): bicyclic nucleic acid (BNA)
  modified_base (22)..(22): bicyclic nucleic acid (BNA)
  source: /note="3' tri-ethylene glycol (TEG)"
atcaaggaagauggcauuucta

SEQ ID NO: 21768 - DNA, 21 bp, Artificial Sequence
  source: /note="Description of Artificial Sequence: Synthetic oligonucleotide"
  source: /note="Description of Combined DNA/RNA Molecule: Synthetic oligonucleotide"
  source: /note="DNA/RNA"
  modified_base (1)..(1): bicyclic nucleic acid (BNA)
  modified_base (2)..(2): bicyclic nucleic acid (BNA)
  modified_base (3)..(3): 5-methyl modified nucleotide
  modified_base (15)..(15): 5-methyl modified nucleotide
  modified_base (20)..(20): 5-methyl bicyclic nucleic acid
  modified_base (21)..(21): bicyclic nucleic acid (BNA)
  source: /note="3' tri-ethylene glycol (TEG)"
atcaaggaagauggcauuuct

SEQ ID NO: 21769 - DNA, 20 bp, Artificial Sequence
  source: /note="Description of Artificial Sequence: Synthetic oligonucleotide"
  source: /note="Description of Combined DNA/RNA Molecule: Synthetic oligonucleotide"
  source: /note="DNA/RNA"
  modified_base (1)..(1): bicyclic nucleic acid (BNA)
  modified_base (2)..(2): bicyclic nucleic acid (BNA)
  modified_base (3)..(3): 5-methyl modified nucleotide
  modified_base (15)..(15): 5-methyl modified nucleotide
  modified_base (19)..(19): bicyclic nucleic acid (BNA)
  modified_base (20)..(20): 5-methyl bicyclic nucleic acid
  source: /note="3' tri-ethylene glycol (TEG)"
atcaaggaagauggcauutc

SEQ ID NO: 21770 - DNA, 19 bp, Artificial Sequence
  source: /note="Description of Artificial Sequence: Synthetic oligonucleotide"
  source: /note="Description of Combined DNA/RNA Molecule: Synthetic oligonucleotide"
  source: /note="DNA/RNA"
  modified_base (1)..(1): bicyclic nucleic acid (BNA)
  modified_base (2)..(2): bicyclic nucleic acid (BNA)
  modified_base (3)..(3): 5-methyl modified nucleotide
  modified_base (15)..(15): 5-methyl modified nucleotide
  modified_base (18)..(18): bicyclic nucleic acid (BNA)
  modified_base (19)..(19): bicyclic nucleic acid (BNA)
  source: /note="3' tri-ethylene glycol (TEG)"
atcaaggaagauggcautt

SEQ ID NO: 21771 - DNA, 18 bp, Artificial Sequence
  source: /note="Description of Artificial Sequence: Synthetic oligonucleotide"
  source: /note="Description of Combined DNA/RNA Molecule: Synthetic oligonucleotide"
  source: /note="DNA/RNA"
  modified_base (1)..(1): bicyclic nucleic acid (BNA)
  modified_base (2)..(2): bicyclic nucleic acid (BNA)
  modified_base (3)..(3): 5-methyl modified nucleotide
  modified_base (15)..(15): 5-methyl modified nucleotide
  modified_base (17)..(17): bicyclic nucleic acid (BNA)
  modified_base (18)..(18): bicyclic nucleic acid (BNA)
  source: /note="3' tri-ethylene glycol (TEG)"
atcaaggaagauggcatt

SEQ ID NO: 21772 - DNA, 17 bp, Artificial Sequence
  source: /note="Description of Artificial Sequence: Synthetic oligonucleotide"
  source: /note="Description of Combined DNA/RNA Molecule: Synthetic oligonucleotide"
  source: /note="DNA/RNA"
  modified_base (1)..(1): bicyclic nucleic acid (BNA)
  modified_base (2)..(2): bicyclic nucleic acid (BNA)
  modified_base (3)..(3): 5-methyl modified nucleotide
  modified_base (15)..(15): 5-methyl modified nucleotide
  modified_base (16)..(16): bicyclic nucleic acid (BNA)
  modified_base (17)..(17): bicyclic nucleic acid (BNA)
  source: /note="3' tri-ethylene glycol (TEG)"
atcaaggaagauggcat

SEQ ID NO: 21773 - DNA, 16 bp, Artificial Sequence
  source: /note="Description of Artificial Sequence: Synthetic oligonucleotide"
  source: /note="Description of Combined DNA/RNA Molecule: Synthetic oligonucleotide"
  source: /note="DNA/RNA"
  modified_base (1)..(1): bicyclic nucleic acid (BNA)
  modified_base (2)..(2): bicyclic nucleic acid (BNA)
  modified_base (3)..(3): 5-methyl modified nucleotide
  modified_base (15)..(15): 5-methyl bicyclic nucleic acid
  modified_base (16)..(16): bicyclic nucleic acid (BNA)
  source: /note="3' tri-ethylene glycol (TEG)"
atcaaggaagauggca

SEQ ID NO: 21774 - DNA, 15 bp, Artificial Sequence
  source: /note="Description of Artificial Sequence: Synthetic oligonucleotide"
  source: /note="Description of Combined DNA/RNA Molecule: Synthetic oligonucleotide"
  source: /note="DNA/RNA"
  modified_base (1)..(1): bicyclic nucleic acid (BNA)
  modified_base (2)..(2): bicyclic nucleic acid (BNA)
  modified_base (3)..(3): 5-methyl modified nucleotide
  modified_base (14)..(14): bicyclic nucleic acid (BNA)
  modified_base (15)..(15): 5-methyl bicyclic nucleic acid
  source: /note="3' tri-ethylene glycol (TEG)"
atcaaggaagauggc

SEQ ID NO: 21775 - DNA, 14 bp, Artificial Sequence
  source: /note="Description of Artificial Sequence: Synthetic oligonucleotide"
  source: /note="Description of Combined DNA/RNA Molecule: Synthetic oligonucleotide"
  source: /note="DNA/RNA"
  modified_base (1)..(1): bicyclic nucleic acid (BNA)
  modified_base (2)..(2): bicyclic nucleic acid (BNA)
  modified_base (3)..(3): 5-methyl modified nucleotide
  modified_base (13)..(13): bicyclic nucleic acid (BNA)
  modified_base (14)..(14): bicyclic nucleic acid (BNA)
  source: /note="3' tri-ethylene glycol (TEG)"
atcaaggaagaugg

SEQ ID NO: 21776 - DNA, 13 bp, Artificial Sequence
  source: /note="Description of Artificial Sequence: Synthetic oligonucleotide"
  source: /note="DNA/RNA"
  modified_base (1)..(1): bicyclic nucleic acid (BNA)
  modified_base (2)..(2): bicyclic nucleic acid (BNA)
  modified_base (3)..(3): 5-methyl modified nucleotide
  modified_base (12)..(12): bicyclic nucleic acid (BNA)
  modified_base (13)..(13): bicyclic nucleic acid (BNA)
  source: /note="3' tri-ethylene glycol (TEG)"
atcaaggaagatg

SEQ ID NO: 21777 - DNA, 12 bp, Artificial Sequence
  source: /note="Description of Artificial Sequence: Synthetic oligonucleotide"
  source: /note="DNA/RNA"
  modified_base (1)..(1): bicyclic nucleic acid (BNA)
  modified_base (2)..(2): bicyclic nucleic acid (BNA)
  modified_base (3)..(3): 5-methyl modified nucleotide
  modified_base (11)..(11): bicyclic nucleic acid (BNA)
  modified_base (12)..(12): bicyclic nucleic acid (BNA)
  source: /note="3' tri-ethylene glycol (TEG)"
atcaaggaagat

SEQ ID NO: 21778 - DNA, 11 bp, Artificial Sequence
  source: /note="Description of Artificial Sequence: Synthetic oligonucleotide"
  source: /note="DNA/RNA"
  modified_base (1)..(1): bicyclic nucleic acid (BNA)
  modified_base (2)..(2): bicyclic nucleic acid (BNA)
  modified_base (3)..(3): 5-methyl modified nucleotide
  modified_base (10)..(10): bicyclic nucleic acid (BNA)
  modified_base (11)..(11): bicyclic nucleic acid (BNA)
  source: /note="3' tri-ethylene glycol (TEG)"
atcaaggaaga

SEQ ID NO: 21779 - DNA, 10 bp, Artificial Sequence
  source: /note="Description of Artificial Sequence: Synthetic oligonucleotide"
  source: /note="DNA/RNA"
  modified_base (1)..(1): bicyclic nucleic acid (BNA)
  modified_base (2)..(2): bicyclic nucleic acid (BNA)
  modified_base (3)..(3): 5-methyl modified nucleotide
  modified_base (9)..(9): bicyclic nucleic acid (BNA)
  modified_base (10)..(10): bicyclic nucleic acid (BNA)
  source: /note="3' tri-ethylene glycol (TEG)"
atcaaggaag

SEQ ID NO: 21780 - DNA, 23 bp, Artificial Sequence
  source: /note="Description of Artificial Sequence: Synthetic oligonucleotide"
  source: /note="Description of Combined DNA/RNA Molecule: Synthetic oligonucleotide"
  source: /note="DNA/RNA"
  modified_base (1)..(1): 5-methyl bicyclic nucleic acid
  modified_base (2)..(2): 5-methyl bicyclic nucleic acid
  modified_base (7)..(7): 5-methyl modified nucleotide
  modified_base (13)..(13): 5-methyl modified nucleotide
  modified_base (14)..(14): 5-methyl modified nucleotide
  modified_base (16)..(16): 5-methyl modified nucleotide
  modified_base (17)..(17): 5-methyl modified nucleotide
  modified_base (20)..(20): 5-methyl modified nucleotide
  modified_base (22)..(22): bicyclic nucleic acid (BNA)
  modified_base (23)..(23): 5-methyl bicyclic nucleic acid
  source: /note="3' tri-ethylene glycol (TEG)"
ccagagcagguaccuccaacatc

SEQ ID NO: 21781 - RNA, 18 nt, Artificial Sequence
  source: /note="Description of Artificial Sequence: Synthetic oligonucleotide"
  source: /note="RNA"
  modified_base (1)..(1): 5-methyl bicyclic nucleic acid
  modified_base (2)..(2): 5-methyl bicyclic nucleic acid
  modified_base (7)..(7): 5-methyl modified nucleotide
  modified_base (13)..(13): 5-methyl modified nucleotide
  modified_base (14)..(14): 5-methyl modified nucleotide
  modified_base (16)..(16): 5-methyl modified nucleotide
  modified_base (17)..(17): 5-methyl bicyclic nucleic acid
  modified_base (18)..(18): bicyclic nucleic acid (BNA)
  source: /note="3' tri-ethylene glycol (TEG)"
ccagagcagguaccucca

SEQ ID NO: 21782 - DNA, 23 bp, Artificial Sequence
  source: /note="Description of Artificial Sequence: Synthetic oligonucleotide"
  source: /note="Description of Combined DNA/RNA Molecule: Synthetic oligonucleotide"
  source: /note="DNA/RNA"
  modified_base (1)..(1): 5-methyl bicyclic nucleic acid
  modified_base (2)..(2): 5-methyl bicyclic nucleic acid
  modified_base (4)..(4): 5-methyl modified nucleotide
  modified_base (18)..(18): 5-methyl modified nucleotide
  modified_base (22)..(22): bicyclic nucleic acid (BNA)
  modified_base (23)..(23): bicyclic nucleic acid (BNA)
  source: /note="3' tri-ethylene glycol (TEG)"
ccucugugauuuuauaacuugat

SEQ ID NO: 21783 - DNA, 17 bp, Artificial Sequence
  source: /note="Description of Artificial Sequence: Synthetic oligonucleotide"
  source: /note="Description of Combined DNA/RNA Molecule: Synthetic oligonucleotide"
  source: /note="DNA/RNA"
  modified_base (1)..(1): bicyclic nucleic acid (BNA)
  modified_base (2)..(2): 5-methyl bicyclic nucleic acid
  modified_base (4)..(4): 5-methyl modified nucleotide
  modified_base (5)..(5): 5-methyl modified nucleotide
  modified_base (6)..(6): 5-methyl modified nucleotide
  modified_base (8)..(8): 5-methyl modified nucleotide
  modified_base (9)..(9): 5-methyl modified nucleotide
  modified_base (12)..(12): 5-methyl modified nucleotide
  modified_base (14)..(14): 5-methyl modified nucleotide
  modified_base (15)..(15): 5-methyl modified nucleotide
  modified_base (16)..(16): 5-methyl bicyclic nucleic acid
  modified_base (17)..(17): bicyclic nucleic acid (BNA)
  source: /note="3' tri-ethylene glycol (TEG)"
tcacccaccaucaccct

SEQ ID NO: 21784 - DNA, 20 bp, Artificial Sequence
  source: /note="Description of Artificial Sequence: Synthetic oligonucleotide"
  source: /note="Description of Combined DNA/RNA Molecule: Synthetic oligonucleotide"
  source: /note="DNA/RNA"
  modified_base (1)..(1): bicyclic nucleic acid (BNA)
  modified_base (2)..(2): bicyclic nucleic acid (BNA)
  modified_base (7)..(7): 5-methyl modified nucleotide
  modified_base (8)..(8): 5-methyl modified nucleotide
  modified_base (10)..(10): 5-methyl modified nucleotide
  modified_base (16)..(16): 5-methyl modified nucleotide
  modified_base (18)..(18): 5-methyl modified nucleotide
  modified_base (19)..(19): 5-methyl bicyclic nucleic acid
  modified_base (20)..(20): 5-methyl bicyclic nucleic acid
  source: /note="3' tri-ethylene glycol (TEG)"
tgauauccucaaggucaccc

SEQ ID NO: 21785 - DNA, 22 bp, Artificial Sequence
  source: /note="Description of Artificial Sequence: Synthetic oligonucleotide"
  source: /note="Description of Combined DNA/RNA Molecule: Synthetic oligonucleotide"
  source: /note="DNA/RNA"
  modified_base (1)..(1): 5-methyl bicyclic nucleic acid
  modified_base (2)..(2): bicyclic nucleic acid (BNA)
  modified_base (4)..(4): 5-methyl modified nucleotide
  modified_base (13)..(13): 5-methyl modified nucleotide
  modified_base (16)..(16): 5-methyl modified nucleotide
  modified_base (18)..(18): 5-methyl modified nucleotide
  modified_base (21)..(21): bicyclic nucleic acid (BNA)
  modified_base (22)..(22): bicyclic nucleic acid (BNA)
  source: /note="3' tri-ethylene glycol (TEG)"
ctgcuugaugaucaucucgutg

SEQ ID NO: 21786 - DNA, 18 bp, Artificial Sequence
  source: /note="Description of Artificial Sequence: Synthetic oligonucleotide"
  source: /note="Description of Combined DNA/RNA Molecule: Synthetic oligonucleotide"
  source: /note="DNA/RNA"
  modified_base (1)..(1): 5-methyl bicyclic nucleic acid
  modified_base (2)..(2): bicyclic nucleic acid (BNA)
  modified_base (4)..(4): 5-methyl modified nucleotide
  modified_base (13)..(13): 5-methyl modified nucleotide
  modified_base (16)..(16): 5-methyl modified nucleotide
  modified_base (17)..(17): bicyclic nucleic acid (BNA)
  modified_base (18)..(18): 5-methyl bicyclic nucleic acid
  source: /note="3' tri-ethylene glycol (TEG)"
ctgcuugaugaucauctc

SEQ ID NO: 21787 - DNA, 19 bp, Artificial Sequence
  source: /note="Description of Artificial Sequence: Synthetic oligonucleotide"
  source: /note="Description of Combined DNA/RNA Molecule: Synthetic oligonucleotide"
  source: /note="DNA/RNA"
  modified_base (1)..(1): bicyclic nucleic acid (BNA)
  modified_base (2)..(2): bicyclic nucleic acid (BNA)
  modified_base (5)..(5): 5-methyl modified nucleotide
  modified_base (6)..(6): 5-methyl modified nucleotide
  modified_base (14)..(14): 5-methyl modified nucleotide
  modified_base (15)..(15): 5-methyl modified nucleotide
  modified_base (17)..(17): 5-methyl modified nucleotide
  modified_base (18)..(18): bicyclic nucleic acid (BNA)
  modified_base (19)..(19): bicyclic nucleic acid (BNA)
  source: /note="3' tri-ethylene glycol (TEG)"
gtuuccuuaguaaccacag

SEQ ID NO: 21788 - DNA, 17 bp, Artificial Sequence
  source: /note="Description of Artificial Sequence: Synthetic oligonucleotide"
  source: /note="Description of Combined DNA/RNA Molecule: Synthetic oligonucleotide"
  source: /note="DNA/RNA"
  modified_base (1)..(1): bicyclic nucleic acid (BNA)
  modified_base (2)..(2): bicyclic nucleic acid (BNA)
  modified_base (5)..(5): 5-methyl modified nucleotide
  modified_base (6)..(6): 5-methyl modified nucleotide
  modified_base (14)..(14): 5-methyl modified nucleotide
  modified_base (15)..(15): 5-methyl modified nucleotide
  modified_base (16)..(16): bicyclic nucleic acid (BNA)
  modified_base (17)..(17): 5-methyl bicyclic nucleic acid
  source: /note="3' tri-ethylene glycol (TEG)"
gtuuccuuaguaaccac

SEQ ID NO: 21789 - DNA, 20 bp, Artificial Sequence
  source: /note="Description of Artificial Sequence: Synthetic oligonucleotide"
  source: /note="Description of Combined DNA/RNA Molecule: Synthetic oligonucleotide"
  source: /note="DNA/RNA"
  source: /note="5' tri-ethylene glycol (TEG)"
  modified_base (1)..(1): bicyclic nucleic acid (BNA)
  modified_base (2)..(2): 5-methyl bicyclic nucleic acid
  modified_base (14)..(14): 5-methyl modified nucleotide
  modified_base (19)..(19): 5-methyl bicyclic nucleic acid
  modified_base (20)..(20): bicyclic nucleic acid (BNA)
  source: /note="3' tri-ethylene glycol (TEG)"
tcaaggaagauggcauuuct

SEQ ID NO: 21790 - DNA, 22 bp, Artificial Sequence
  source: /note="Description of Artificial Sequence: Synthetic oligonucleotide"
  source: /note="Description of Combined DNA/RNA Molecule: Synthetic oligonucleotide"
  source: /note="DNA/RNA"
  source: /note="5' tri-ethylene glycol (TEG)"
  modified_base (1)..(1): bicyclic nucleic acid (BNA)
  modified_base (2)..(2): 5-methyl bicyclic nucleic acid
  modified_base (14)..(14): 5-methyl modified nucleotide
  modified_base (19)..(19): 5-methyl modified nucleotide
  modified_base (21)..(21): bicyclic nucleic acid (BNA)
  modified_base (22)..(22): bicyclic nucleic acid (BNA)
  source: /note="3' tri-ethylene glycol (TEG)"
tcaaggaagauggcauuucuag

SEQ ID NO: 21791 - RNA, 18 nt, Artificial Sequence
  source: /note="Description of Artificial Sequence: Synthetic oligonucleotide"
  source: /note="RNA"
  source: /note="5' tri-ethylene glycol (TEG)"
  modified_base (1)..(1): bicyclic nucleic acid (BNA)
  modified_base (2)..(2): bicyclic nucleic acid (BNA)
  modified_base (9)..(9): 5-methyl modified nucleotide
  modified_base (13)..(13): 5-methyl modified nucleotide
  modified_base (14)..(14): 5-methyl modified nucleotide
  modified_base (17)..(17): bicyclic nucleic acid (BNA)
  modified_base (18)..(18): 5-methyl bicyclic nucleic acid
  source: /note="3' tri-ethylene glycol (TEG)"
gguaaguucuguccaagc

SEQ ID NO: 21792 - DNA, 18 bp, Artificial Sequence
  source: /note="Description of Artificial Sequence: Synthetic oligonucleotide"
  source: /note="Description of Combined DNA/RNA Molecule: Synthetic oligonucleotide"
  source: /note="DNA/RNA"
  source: /note="5' tri-ethylene glycol (TEG)"
  modified_base (1)..(1): bicyclic nucleic acid (BNA)
  modified_base (2)..(2): bicyclic nucleic acid (BNA)
  modified_base (8)..(8): 5-methyl modified nucleotide
  modified_base (12)..(12): 5-methyl modified nucleotide
  modified_base (13)..(13): 5-methyl modified nucleotide
  modified_base (17)..(17): 5-methyl bicyclic nucleic acid
  modified_base (18)..(18): 5-methyl bicyclic nucleic acid
  source: /note="3' tri-ethylene glycol (TEG)"
gtaaguucuguccaagcc

SEQ ID NO: 21793 - RNA, 18 nt, Artificial Sequence
  source: /note="Description of Artificial Sequence: Synthetic oligonucleotide"
  source: /note="RNA"
  source: /note="5' tri-ethylene glycol (TEG)"
  modified_base (1)..(1): bicyclic nucleic acid (BNA)
  modified_base (2)..(2): bicyclic nucleic acid (BNA)
  modified_base (4)..(4): 5-methyl modified nucleotide
  modified_base (13)..(13): 5-methyl modified nucleotide
  modified_base (17)..(17): 5-methyl bicyclic nucleic acid
  modified_base (18)..(18): 5-methyl bicyclic nucleic acid
  source: /note="3' tri-ethylene glycol (TEG)"
agucgguaaguucugucc

SEQ ID NO: 21794 - DNA, 18 bp, Artificial Sequence
  source: /note="Description of Artificial Sequence: Synthetic oligonucleotide"
  source: /note="Description of Combined DNA/RNA Molecule: Synthetic oligonucleotide"
  source: /note="DNA/RNA"
  source: /note="5' tri-ethylene glycol (TEG)"
  modified_base (1)..(1): 5-methyl bicyclic nucleic acid
  modified_base (2)..(2): bicyclic nucleic acid (BNA)
  modified_base (5)..(5): 5-methyl modified nucleotide
  modified_base (6)..(6): 5-methyl modified nucleotide
  modified_base (10)..(10): 5-methyl modified nucleotide
  modified_base (11)..(11): 5-methyl modified nucleotide
  modified_base (12)..(12): 5-methyl modified nucleotide
  modified_base (17)..(17): bicyclic nucleic acid (BNA)
  modified_base (18)..(18): bicyclic nucleic acid (BNA)
  source: /note="3' tri-ethylene glycol (TEG)"
ctguccaagcccgguuga

SEQ ID NO: 21795 - DNA, 15 bp, Artificial Sequence
  source: /note="Description of Artificial Sequence: Synthetic oligonucleotide"
  source: /note="Description of Combined DNA/RNA Molecule: Synthetic oligonucleotide"
  source: /note="DNA/RNA"
  source: /note="5' tri-ethylene glycol (TEG)"
  modified_base (1)..(1): bicyclic nucleic acid (BNA)
  modified_base (2)..(2): bicyclic nucleic acid (BNA)
  modified_base (7)..(7): 5-methyl modified nucleotide
  modified_base (11)..(11): 5-methyl modified nucleotide
  modified_base (12)..(12): 5-methyl modified nucleotide
  modified_base (14)..(14): bicyclic nucleic acid (BNA)
  modified_base (15)..(15): bicyclic nucleic acid (BNA)
  source: /note="3' tri-ethylene glycol (TEG)"
taaguucuguccaag

SEQ ID NO: 21796 - DNA, 20 bp, Artificial Sequence
  source: /note="Description of Artificial Sequence: Synthetic oligonucleotide"
  source: /note="Description of Combined DNA/RNA Molecule: Synthetic oligonucleotide"
  source: /note="DNA/RNA"
  source: /note="5' tri-ethylene glycol (TEG)"
  modified_base (1)..(1): bicyclic nucleic acid (BNA)
  modified_base (2)..(2): bicyclic nucleic acid (BNA)
  modified_base (3)..(3): 5-methyl modified nucleotide
  modified_base (7)..(7): 5-methyl modified nucleotide
  modified_base (8)..(8): 5-methyl modified nucleotide
  modified_base (12)..(12): 5-methyl modified nucleotide
  modified_base (13)..(13): 5-methyl modified nucleotide
  modified_base (14)..(14): 5-methyl modified nucleotide
  modified_base (19)..(19): bicyclic nucleic acid (BNA)
  modified_base (20)..(20): bicyclic nucleic acid (BNA)
  source: /note="3' tri-ethylene glycol (TEG)"
ttcuguccaagcccgguuga

SEQ ID NO: 21797 - DNA, 19 bp, Artificial Sequence
  source: /note="Description of Artificial Sequence: Synthetic oligonucleotide"
  source: /note="Description of Combined DNA/RNA Molecule: Synthetic oligonucleotide"
  source: /note="DNA/RNA"
  source: /note="5' tri-ethylene glycol (TEG)"
  modified_base (1)..(1): bicyclic nucleic acid (BNA)
  modified_base (2)..(2): bicyclic nucleic acid (BNA)
  modified_base (3)..(3): 5-methyl modified nucleotide
  modified_base (7)..(7): 5-methyl modified nucleotide
  modified_base (8)..(8): 5-methyl modified nucleotide
  modified_base (12)..(12): 5-methyl modified nucleotide
  modified_base (13)..(13): 5-methyl modified nucleotide
  modified_base (14)..(14): 5-methyl modified nucleotide
  modified_base (18)..(18): bicyclic nucleic acid (BNA)
  modified_base (19)..(19): bicyclic nucleic acid (BNA)
  source: /note="3' tri-ethylene glycol (TEG)"
ttcuguccaagcccggutg

SEQ ID NO: 21798 - DNA, 18 bp, Artificial Sequence
  source: /note="Description of Artificial Sequence: Synthetic oligonucleotide"
  source: /note="Description of Combined DNA/RNA Molecule: Synthetic oligonucleotide"
  source: /note="DNA/RNA"
  source: /note="5' tri-ethylene glycol (TEG)"
  modified_base (1)..(1): bicyclic nucleic acid (BNA)
  modified_base (2)..(2): bicyclic nucleic acid (BNA)
  modified_base (3)..(3): 5-methyl modified nucleotide
  modified_base (7)..(7): 5-methyl modified nucleotide
  modified_base (8)..(8): 5-methyl modified nucleotide
  modified_base (12)..(12): 5-methyl modified nucleotide
  modified_base (13)..(13): 5-methyl modified nucleotide
  modified_base (14)..(14): 5-methyl modified nucleotide
  modified_base (17)..(17): bicyclic nucleic acid (BNA)
  modified_base (18)..(18): bicyclic nucleic acid (BNA)
  source: /note="3' tri-ethylene glycol (TEG)"
ttcuguccaagcccggtt

SEQ ID NO: 21799 - DNA, 17 bp, Artificial Sequence
  source: /note="Description of Artificial Sequence: Synthetic oligonucleotide"
  source: /note="Description of Combined DNA/RNA Molecule: Synthetic oligonucleotide"
  source: /note="DNA/RNA"
  source: /note="5' tri-ethylene glycol (TEG)"
  modified_base (1)..(1): bicyclic nucleic acid (BNA)
  modified_base (2)..(2): bicyclic nucleic acid (BNA)
  modified_base (3)..(3): 5-methyl modified nucleotide
  modified_base (7)..(7): 5-methyl modified nucleotide
  modified_base (8)..(8): 5-methyl modified nucleotide
  modified_base (12)..(12): 5-methyl modified nucleotide
  modified_base (13)..(13): 5-methyl modified nucleotide
  modified_base (14)..(14): 5-methyl modified nucleotide
  modified_base (16)..(16): bicyclic nucleic acid (BNA)
  modified_base (17)..(17): bicyclic nucleic acid (BNA)
  source: /note="3' tri-ethylene glycol (TEG)"
ttcuguccaagcccggt

SEQ ID NO: 21800 - DNA, 16 bp, Artificial Sequence
  source: /note="Description of Artificial Sequence: Synthetic oligonucleotide"
  source: /note="Description of Combined DNA/RNA Molecule: Synthetic oligonucleotide"
  source: /note="DNA/RNA"
  source: /note="5' tri-ethylene glycol (TEG)"
  modified_base (1)..(1): bicyclic nucleic acid (BNA)
  modified_base (2)..(2): bicyclic nucleic acid (BNA)
  modified_base (3)..(3): 5-methyl modified nucleotide
  modified_base (7)..(7): 5-methyl modified nucleotide
  modified_base (8)..(8): 5-methyl modified nucleotide
  modified_base (12)..(12): 5-methyl modified nucleotide
  modified_base (13)..(13): 5-methyl modified nucleotide
  modified_base (14)..(14): 5-methyl modified nucleotide
  modified_base (15)..(15): bicyclic nucleic acid (BNA)
  modified_base (16)..(16): bicyclic nucleic acid (BNA)
  source: /note="3' tri-ethylene glycol (TEG)"
ttcuguccaagcccgg

SEQ ID NO: 21801 - DNA, 15 bp, Artificial Sequence
  source: /note="Description of Artificial Sequence: Synthetic oligonucleotide"
  source: /note="Description of Combined DNA/RNA Molecule: Synthetic oligonucleotide"
  source: /note="DNA/RNA"
  source: /note="5' tri-ethylene glycol (TEG)"
  modified_base (1)..(1): bicyclic nucleic acid (BNA)
  modified_base (2)..(2): bicyclic nucleic acid (BNA)
  modified_base (3)..(3): 5-methyl modified nucleotide
  modified_base (7)..(7): 5-methyl modified nucleotide
  modified_base (8)..(8): 5-methyl modified nucleotide
  modified_base (12)..(12): 5-methyl modified nucleotide
  modified_base (13)..(13): 5-methyl modified nucleotide
  modified_base (14)..(14): 5-methyl bicyclic nucleic acid
  modified_base (15)..(15): bicyclic nucleic acid (BNA)
  source: /note="3' tri-ethylene glycol (TEG)"
ttcuguccaagcccg

SEQ ID NO: 21802 - DNA, 14 bp, Artificial Sequence
  source: /note="Description of Artificial Sequence: Synthetic oligonucleotide"
  source: /note="Description of Combined DNA/RNA Molecule: Synthetic oligonucleotide"
  source: /note="DNA/RNA"
  source: /note="5' tri-ethylene glycol (TEG)"
  modified_base (1)..(1): bicyclic nucleic acid (BNA)
  modified_base (2)..(2): bicyclic nucleic acid (BNA)
  modified_base (3)..(3): 5-methyl modified nucleotide
  modified_base (7)..(7): 5-methyl modified nucleotide
  modified_base (8)..(8): 5-methyl modified nucleotide
  modified_base (12)..(12): 5-methyl modified nucleotide
  modified_base (13)..(13): 5-methyl bicyclic nucleic acid
  modified_base (14)..(14): 5-methyl bicyclic nucleic acid
  source: /note="3' tri-ethylene glycol (TEG)"
ttcuguccaagccc

SEQ ID NO: 21803 - DNA, 13 bp, Artificial Sequence
  source: /note="Description of Artificial Sequence: Synthetic oligonucleotide"
  source: /note="Description of Combined DNA/RNA Molecule: Synthetic oligonucleotide"
  source: /note="DNA/RNA"
  source: /note="5' tri-ethylene glycol (TEG)"
  modified_base (1)..(1): bicyclic nucleic acid (BNA)
  modified_base (2)..(2): bicyclic nucleic acid (BNA)
  modified_base (3)..(3): 5-methyl modified nucleotide
  modified_base (7)..(7): 5-methyl modified nucleotide
  modified_base (8)..(8): 5-methyl modified nucleotide
  modified_base (12)..(12): 5-methyl bicyclic nucleic acid
  modified_base (13)..(13): 5-methyl bicyclic nucleic acid
  source: /note="3' tri-ethylene glycol (TEG)"
ttcuguccaagcc

SEQ ID NO: 21804 - DNA, 12 bp, Artificial Sequence
  source: /note="Description of Artificial Sequence: Synthetic oligonucleotide"
  source: /note="Description of Combined DNA/RNA Molecule: Synthetic oligonucleotide"
  source: /note="DNA/RNA"
  source: /note="5' tri-ethylene glycol (TEG)"
  modified_base (1)..(1): bicyclic nucleic acid (BNA)
  modified_base (2)..(2): bicyclic nucleic acid (BNA)
  modified_base (3)..(3): 5-methyl modified nucleotide
  modified_base (7)..(7): 5-methyl modified nucleotide
  modified_base (8)..(8): 5-methyl modified nucleotide
  modified_base (11)..(11): bicyclic nucleic acid (BNA)
  modified_base (12)..(12): 5-methyl bicyclic nucleic acid
  source: /note="3' tri-ethylene glycol (TEG)"
ttcuguccaagc

SEQ ID NO: 21805 - DNA, 11 bp, Artificial Sequence
  source: /note="Description of Artificial Sequence: Synthetic oligonucleotide"
  source: /note="Description of Combined DNA/RNA Molecule: Synthetic oligonucleotide"
  source: /note="DNA/RNA"
  source: /note="5' tri-ethylene glycol (TEG)"
  modified_base (1)..(1): bicyclic nucleic acid (BNA)
  modified_base (2)..(2): bicyclic nucleic acid (BNA)
  modified_base (3)..(3): 5-methyl modified nucleotide
  modified_base (7)..(7): 5-methyl modified nucleotide
  modified_base (8)..(8): 5-methyl modified nucleotide
  modified_base (10)..(10): bicyclic nucleic acid (BNA)
  modified_base (11)..(11): bicyclic nucleic acid (BNA)
  source: /note="3' tri-ethylene glycol (TEG)"
ttcuguccaag

SEQ ID NO: 21806 - DNA, 10 bp, Artificial Sequence
  source: /note="Description of Artificial Sequence: Synthetic oligonucleotide"
  source: /note="Description of Combined DNA/RNA Molecule: Synthetic oligonucleotide"
  source: /note="DNA/RNA"
  source: /note="5' tri-ethylene glycol (TEG)"
  modified_base (1)..(1): bicyclic nucleic acid (BNA)
  modified_base (2)..(2): bicyclic nucleic acid (BNA)
  modified_base (3)..(3): 5-methyl modified nucleotide
  modified_base (7)..(7): 5-methyl modified nucleotide
  modified_base (8)..(8): 5-methyl modified nucleotide
  modified_base (9)..(9): bicyclic nucleic acid (BNA)
  modified_base (10)..(10): bicyclic nucleic acid (BNA)
  source: /note="3' tri-ethylene glycol (TEG)"
ttcuguccaa

SEQ ID NO: 21807 - DNA, 9 bp, Artificial Sequence
  source: /note="Description of Artificial Sequence: Synthetic oligonucleotide"
  source: /note="Description of Combined DNA/RNA Molecule: Synthetic oligonucleotide"
  source: /note="DNA/RNA"
  source: /note="5' tri-ethylene glycol (TEG)"
  modified_base (1)..(1): bicyclic nucleic acid (BNA)
  modified_base (2)..(2): bicyclic nucleic acid (BNA)
  modified_base (3)..(3): 5-methyl modified nucleotide
  modified_base (7)..(7): 5-methyl modified nucleotide
  modified_base (8)..(8): 5-methyl bicyclic nucleic acid
  modified_base (9)..(9): bicyclic nucleic acid (BNA)
  source: /note="3' tri-ethylene glycol (TEG)"
ttcugucca

SEQ ID NO: 21808 - DNA, 8 bp, Artificial Sequence
  source: /note="Description of Artificial Sequence: Synthetic oligonucleotide"
  source: /note="Description of Combined DNA/RNA Molecule: Synthetic oligonucleotide"
  source: /note="DNA/RNA"
  source: /note="5' tri-ethylene glycol (TEG)"
  modified_base (1)..(1): bicyclic nucleic acid (BNA)
  modified_base (2)..(2): bicyclic nucleic acid (BNA)
  modified_base (3)..(3): 5-methyl modified nucleotide
  modified_base (7)..(7): 5-methyl bicyclic nucleic acid
  modified_base (8)..(8): 5-methyl bicyclic nucleic acid
  source: /note="3' tri-ethylene glycol (TEG)"
ttcugucc

SEQ ID NO: 21809 - DNA, 19 bp, Artificial Sequence
  source: /note="Description of Artificial Sequence: Synthetic oligonucleotide"
  source: /note="Description of Combined DNA/RNA Molecule: Synthetic oligonucleotide"
  source: /note="DNA/RNA"
  source: /note="5' tri-ethylene glycol (TEG)"
  modified_base (1)..(1): bicyclic nucleic acid (BNA)
  modified_base (2)..(2): 5-methyl bicyclic nucleic acid
  modified_base (6)..(6): 5-methyl modified nucleotide
  modified_base (7)..(7): 5-methyl modified nucleotide
  modified_base (11)..(11): 5-methyl modified nucleotide
  modified_base (12)..(12): 5-methyl modified nucleotide
  modified_base (13)..(13): 5-methyl modified nucleotide
  modified_base (18)..(18): bicyclic nucleic acid (BNA)
  modified_base (19)..(19): bicyclic nucleic acid (BNA)
  source: /note="3' tri-ethylene glycol (TEG)"
tcuguccaagcccgguuga

SEQ ID NO: 21810 - DNA, 18 bp, Artificial Sequence
  source: /note="Description of Artificial Sequence: Synthetic oligonucleotide"
  source: /note="Description of Combined DNA/RNA Molecule: Synthetic oligonucleotide"
  source: /note="DNA/RNA"
  source: /note="5' tri-ethylene glycol (TEG)"
  modified_base (1)..(1): bicyclic nucleic acid (BNA)
  modified_base (2)..(2): 5-methyl bicyclic nucleic acid
  modified_base (6)..(6): 5-methyl modified nucleotide
  modified_base (7)..(7): 5-methyl modified nucleotide
  modified_base (11)..(11): 5-methyl modified nucleotide
  modified_base (12)..(12): 5-methyl modified nucleotide
  modified_base (13)..(13): 5-methyl modified nucleotide
  modified_base (17)..(17): bicyclic nucleic acid (BNA)
  modified_base (18)..(18): bicyclic nucleic acid (BNA)
  source: /note="3' tri-ethylene glycol (TEG)"
tcuguccaagcccggutg

SEQ ID NO: 21811 - DNA, 17 bp, Artificial Sequence
  source: /note="Description of Artificial Sequence: Synthetic oligonucleotide"
  source: /note="Description of Combined DNA/RNA Molecule: Synthetic oligonucleotide"
  source: /note="DNA/RNA"
  source: /note="5' tri-ethylene glycol (TEG)"
  modified_base (1)..(1): bicyclic nucleic acid (BNA)
  modified_base (2)..(2): 5-methyl bicyclic nucleic acid
  modified_base (6)..(6): 5-methyl modified nucleotide
  modified_base (7)..(7): 5-methyl modified nucleotide
  modified_base (11)..(11): 5-methyl modified nucleotide
  modified_base (12)..(12): 5-methyl modified nucleotide
  modified_base (13)..(13): 5-methyl modified nucleotide
  modified_base (16)..(16): bicyclic nucleic acid (BNA)
  modified_base (17)..(17): bicyclic nucleic acid (BNA)
  source: /note="3' tri-ethylene glycol (TEG)"
tcuguccaagcccggtt

SEQ ID NO: 21812 - DNA, 16 bp, Artificial Sequence
  source: /note="Description of Artificial Sequence: Synthetic oligonucleotide"
  source: /note="Description of Combined DNA/RNA Molecule: Synthetic oligonucleotide"
  source: /note="DNA/RNA"
  source: /note="5' tri-ethylene glycol (TEG)"
  modified_base (1)..(1): bicyclic nucleic acid (BNA)
  modified_base (2)..(2): 5-methyl bicyclic nucleic acid
  modified_base (6)..(6): 5-methyl modified nucleotide
  modified_base (7)..(7): 5-methyl modified nucleotide
  modified_base (11)..(11): 5-methyl modified nucleotide
  modified_base (12)..(12): 5-methyl modified nucleotide
  modified_base (13)..(13): 5-methyl modified nucleotide
  modified_base (15)..(15): bicyclic nucleic acid (BNA)
  modified_base (16)..(16): bicyclic nucleic acid (BNA)
  source: /note="3' tri-ethylene glycol (TEG)"
tcuguccaagcccggt

SEQ ID NO: 21813 - DNA, 15 bp, Artificial Sequence
  source: /note="Description of Artificial Sequence: Synthetic oligonucleotide"
  source: /note="Description of Combined DNA/RNA Molecule: Synthetic oligonucleotide"
  source: /note="DNA/RNA"
  source: /note="5' tri-ethylene glycol (TEG)"
  modified_base (1)..(1): bicyclic nucleic acid (BNA)
  modified_base (2)..(2): 5-methyl bicyclic nucleic acid
  modified_base (6)..(6): 5-methyl modified nucleotide
  modified_base (7)..(7): 5-methyl modified nucleotide
  modified_base (11)..(11): 5-methyl modified nucleotide
  modified_base (12)..(12): 5-methyl modified nucleotide
  modified_base (13)..(13): 5-methyl modified nucleotide
  modified_base (14)..(14): bicyclic nucleic acid (BNA)
  modified_base (15)..(15): bicyclic nucleic acid (BNA)
  source: /note="3' tri-ethylene glycol (TEG)"
tcuguccaagcccgg

SEQ ID NO: 21814 - DNA, 14 bp, Artificial Sequence
  source: /note="Description of Artificial Sequence: Synthetic oligonucleotide"
  source: /note="Description of Combined DNA/RNA Molecule: Synthetic oligonucleotide"
  source: /note="DNA/RNA"
  source: /note="5' tri-ethylene glycol (TEG)"
  modified_base (1)..(1): bicyclic nucleic acid (BNA)
  modified_base (2)..(2): 5-methyl bicyclic nucleic acid
  modified_base (6)..(6): 5-methyl modified nucleotide
  modified_base (7)..(7): 5-methyl modified nucleotide
  modified_base (11)..(11): 5-methyl modified nucleotide
  modified_base (12)..(12): 5-methyl modified nucleotide
  modified_base (13)..(13): 5-methyl bicyclic nucleic acid
  modified_base (14)..(14): bicyclic nucleic acid (BNA)
  source: /note="3' tri-ethylene glycol (TEG)"
tcuguccaagcccg

SEQ ID NO: 21815 - DNA, 13 bp, Artificial Sequence
  source: /note="Description of Artificial Sequence: Synthetic oligonucleotide"
  source: /note="Description of Combined DNA/RNA Molecule: Synthetic oligonucleotide"
  source: /note="DNA/RNA"
  source: /note="5' tri-ethylene glycol (TEG)"
  modified_base (1)..(1): bicyclic nucleic acid (BNA)
  modified_base (2)..(2): 5-methyl bicyclic nucleic acid
  modified_base (6)..(6): 5-methyl modified nucleotide
  modified_base (7)..(7): 5-methyl modified nucleotide
  modified_base (11)..(11): 5-methyl modified nucleotide
  modified_base (12)..(12): 5-methyl bicyclic nucleic acid
  modified_base (13)..(13): 5-methyl bicyclic nucleic acid
  source: /note="3' tri-ethylene glycol (TEG)"
tcuguccaagccc

SEQ ID NO: 21816 - DNA, 12 bp, Artificial Sequence
  source: /note="Description of Artificial Sequence: Synthetic oligonucleotide"
  source: /note="Description of Combined DNA/RNA Molecule: Synthetic oligonucleotide"
  source: /note="DNA/RNA"
  source: /note="5' tri-ethylene glycol (TEG)"
  modified_base (1)..(1): bicyclic nucleic acid (BNA)
  modified_base (2)..(2): 5-methyl bicyclic nucleic acid
  modified_base (6)..(6): 5-methyl modified nucleotide
  modified_base (7)..(7): 5-methyl modified nucleotide
  modified_base (11)..(11): 5-methyl bicyclic nucleic acid
  modified_base (12)..(12): 5-methyl bicyclic nucleic acid
  source: /note="3' tri-ethylene glycol (TEG)"
tcuguccaagcc

SEQ ID NO: 21817 - DNA, 11 bp, Artificial Sequence
  source: /note="Description of Artificial Sequence: Synthetic oligonucleotide"
  source: /note="Description of Combined DNA/RNA Molecule: Synthetic oligonucleotide"
  source: /note="DNA/RNA"
  source: /note="5' tri-ethylene glycol (TEG)"
  modified_base (1)..(1): bicyclic nucleic acid (BNA)
  modified_base (2)..(2): 5-methyl bicyclic nucleic acid
  modified_base (6)..(6): 5-methyl modified nucleotide
  modified_base (7)..(7): 5-methyl modified nucleotide
  modified_base (10)..(10): bicyclic nucleic acid (BNA)
  modified_base (11)..(11): 5-methyl bicyclic nucleic acid
  source: /note="3' tri-ethylene glycol (TEG)"
tcuguccaagc

SEQ ID NO: 21818 - DNA, 10 bp, Artificial Sequence
  source: /note="Description of Artificial Sequence: Synthetic oligonucleotide"
  source: /note="Description of Combined DNA/RNA Molecule: Synthetic oligonucleotide"
  source: /note="DNA/RNA"
  source: /note="5' tri-ethylene glycol (TEG)"
  modified_base (1)..(1): bicyclic nucleic acid (BNA)
  modified_base (2)..(2): 5-methyl bicyclic nucleic acid
  modified_base (6)..(6): 5-methyl modified nucleotide
  modified_base (7)..(7): 5-methyl modified nucleotide
  modified_base (9)..(9): bicyclic nucleic acid (BNA)
  modified_base (10)..(10): bicyclic nucleic acid (BNA)
  source: /note="3' tri-ethylene glycol (TEG)"
tcuguccaag

SEQ ID NO: 21819 - DNA, 9 bp, Artificial Sequence
  source: /note="Description of Artificial Sequence: Synthetic oligonucleotide"
  source: /note="Description of Combined DNA/RNA Molecule: Synthetic oligonucleotide"
  source: /note="DNA/RNA"
  source: /note="5' tri-ethylene glycol (TEG)"
  modified_base (1)..(1): bicyclic nucleic acid (BNA)
  modified_base (2)..(2): 5-methyl bicyclic nucleic acid
  modified_base (6)..(6): 5-methyl modified nucleotide
  modified_base (7)..(7): 5-methyl modified nucleotide
  modified_base (8)..(8): bicyclic nucleic acid (BNA)
  modified_base (9)..(9): bicyclic nucleic acid (BNA)
  source: /note="3' tri-ethylene glycol (TEG)"
tcuguccaa

SEQ ID NO: 21820 - DNA, 8 bp, Artificial Sequence
  source: /note="Description of Artificial Sequence: Synthetic oligonucleotide"
  source: /note="Description of Combined DNA/RNA Molecule: Synthetic oligonucleotide"
  source: /note="DNA/RNA"
  source: /note="5' tri-ethylene glycol (TEG)"
  modified_base (1)..(1): bicyclic nucleic acid (BNA)
  modified_base (2)..(2): 5-methyl bicyclic nucleic acid
  modified_base (6)..(6): 5-methyl modified nucleotide
  modified_base (7)..(7): 5-methyl bicyclic nucleic acid
  modified_base (8)..(8): bicyclic nucleic acid (BNA)
  source: /note="3' tri-ethylene glycol (TEG)"
tcugucca

SEQ ID NO: 21821 - DNA, 17 bp, Artificial Sequence
  source: /note="Description of Artificial Sequence: Synthetic oligonucleotide"
  source: /note="Description of Combined DNA/RNA Molecule: Synthetic oligonucleotide"
  source: /note="DNA/RNA"
  source: /note="5' tri-ethylene glycol (TEG)"
  modified_base (1)..(1): 5-methyl bicyclic nucleic acid
  modified_base (2)..(2): bicyclic nucleic acid (BNA)
  modified_base (5)..(5): 5-methyl modified nucleotide
  modified_base (6)..(6): 5-methyl modified nucleotide
  modified_base (10)..(10): 5-methyl modified nucleotide
  modified_base (11)..(11): 5-methyl modified nucleotide
  modified_base (12)..(12): 5-methyl modified nucleotide
  modified_base (16)..(16): bicyclic nucleic acid (BNA)
  modified_base (17)..(17): bicyclic nucleic acid (BNA)
  source: /note="3' tri-ethylene glycol (TEG)"
ctguccaagcccggutg

SEQ ID NO: 21822 - DNA, 16 bp, Artificial Sequence
  source: /note="Description of Artificial Sequence: Synthetic oligonucleotide"
  source: /note="Description of Combined DNA/RNA Molecule: Synthetic oligonucleotide"
  source: /note="DNA/RNA"
  source: /note="5' tri-ethylene glycol (TEG)"
  modified_base (1)..(1): 5-methyl bicyclic nucleic acid
  modified_base (2)..(2): bicyclic nucleic acid (BNA)
  modified_base (5)..(5): 5-methyl modified nucleotide
  modified_base (6)..(6): 5-methyl modified nucleotide
  modified_base (10)..(10): 5-methyl modified nucleotide
  modified_base (11)..(11): 5-methyl modified nucleotide
  modified_base (12)..(12): 5-methyl modified nucleotide
  modified_base (15)..(15): bicyclic nucleic acid (BNA)
  modified_base (16)..(16): bicyclic nucleic acid (BNA)
  source: /note="3' tri-ethylene glycol (TEG)"
ctguccaagcccggtt

SEQ ID NO: 21823 - DNA, 15 bp, Artificial Sequence
  source: /note="Description of Artificial Sequence: Synthetic oligonucleotide"
  source: /note="Description of Combined DNA/RNA Molecule: Synthetic oligonucleotide"
  source: /note="DNA/RNA"
  source: /note="5' tri-ethylene glycol (TEG)"
  modified_base (1)..(1): 5-methyl bicyclic nucleic acid
  modified_base (2)..(2): bicyclic nucleic acid (BNA)
  modified_base (5)..(5): 5-methyl modified nucleotide
  modified_base (6)..(6): 5-methyl modified nucleotide
  modified_base (10)..(10): 5-methyl modified nucleotide
  modified_base (11)..(11): 5-methyl modified nucleotide
  modified_base (12)..(12): 5-methyl modified nucleotide
  modified_base (14)..(14): bicyclic nucleic acid (BNA)
  modified_base (15)..(15): bicyclic nucleic acid (BNA)
  source: /note="3' tri-ethylene glycol (TEG)"
ctguccaagcccggt

SEQ ID NO: 21824 - DNA, 14 bp, Artificial Sequence
  source: /note="Description of Artificial Sequence: Synthetic oligonucleotide"
  source: /note="Description of Combined DNA/RNA Molecule: Synthetic oligonucleotide"
  source: /note="DNA/RNA"
  source: /note="5' tri-ethylene glycol (TEG)"
  modified_base (1)..(1): 5-methyl bicyclic nucleic acid
  modified_base (2)..(2): bicyclic nucleic acid (BNA)
  modified_base (5)..(5): 5-methyl modified nucleotide
  modified_base (6)..(6): 5-methyl modified nucleotide
  modified_base (10)..(10): 5-methyl modified nucleotide
  modified_base (11)..(11): 5-methyl modified nucleotide
  modified_base (12)..(12): 5-methyl modified nucleotide
  modified_base (13)..(13): bicyclic nucleic acid (BNA)
  modified_base (14)..(14): bicyclic nucleic acid (BNA)
  source: /note="3' tri-ethylene glycol (TEG)"
ctguccaagcccgg

SEQ ID NO: 21825 - DNA, 13 bp, Artificial Sequence
  source: /note="Description of Artificial Sequence: Synthetic oligonucleotide"
  source: /note="Description of Combined DNA/RNA Molecule: Synthetic oligonucleotide"
  source: /note="DNA/RNA"
  source: /note="5' tri-ethylene glycol (TEG)"
  modified_base (1)..(1): 5-methyl bicyclic nucleic acid
  modified_base (2)..(2): bicyclic nucleic acid (BNA)
  modified_base (5)..(5): 5-methyl modified nucleotide
  modified_base (6)..(6): 5-methyl modified nucleotide
  modified_base (10)..(10): 5-methyl modified nucleotide
  modified_base (11)..(11): 5-methyl modified nucleotide
  modified_base (12)..(12): 5-methyl bicyclic nucleic acid
  modified_base (13)..(13): bicyclic nucleic acid (BNA)
  source: /note="3' tri-ethylene glycol (TEG)"
ctguccaagcccg

SEQ ID NO: 21826 - DNA, 12 bp, Artificial Sequence
  source: /note="Description of Artificial Sequence: Synthetic oligonucleotide"
  source: /note="Description of Combined DNA/RNA Molecule: Synthetic oligonucleotide"
  source: /note="DNA/RNA"
  source: /note="5' tri-ethylene glycol (TEG)"
  modified_base (1)..(1): 5-methyl bicyclic nucleic acid
  modified_base (2)..(2): bicyclic nucleic acid (BNA)
  modified_base (5)..(5): 5-methyl modified nucleotide
  modified_base (6)..(6): 5-methyl modified nucleotide
  modified_base (10)..(10): 5-methyl modified nucleotide
  modified_base (11)..(11): 5-methyl bicyclic nucleic acid
  modified_base (12)..(12): 5-methyl bicyclic nucleic acid
  source: /note="3' tri-ethylene glycol (TEG)"
ctguccaagccc

SEQ ID NO: 21827 - DNA, 11 bp, Artificial Sequence
  source: /note="Description of Artificial Sequence: Synthetic oligonucleotide"
  source: /note="Description of Combined DNA/RNA Molecule: Synthetic oligonucleotide"
  source: /note="DNA/RNA"
  source: /note="5' tri-ethylene glycol (TEG)"
  modified_base (1)..(1): 5-methyl bicyclic nucleic acid
  modified_base (2)..(2): bicyclic nucleic acid (BNA)
  modified_base (5)..(5): 5-methyl modified nucleotide
  modified_base (6)..(6): 5-methyl modified nucleotide
  modified_base (10)..(10): 5-methyl bicyclic nucleic acid
  modified_base (11)..(11): 5-methyl bicyclic nucleic acid
  source: /note="3' tri-ethylene glycol (TEG)"
ctguccaagcc

SEQ ID NO: 21828 - DNA, 10 bp, Artificial Sequence
  source: /note="Description of Artificial Sequence: Synthetic oligonucleotide"
  source: /note="Description of Combined DNA/RNA Molecule: Synthetic oligonucleotide"
  source: /note="DNA/RNA"
  source: /note="5' tri-ethylene glycol (TEG)"
  modified_base (1)..(1): 5-methyl bicyclic nucleic acid
  modified_base (2)..(2): bicyclic nucleic acid (BNA)
  modified_base (5)..(5): 5-methyl modified nucleotide
  modified_base (6)..(6): 5-methyl modified nucleotide
  modified_base (9)..(9): bicyclic nucleic acid (BNA)
  modified_base (10)..(10): 5-methyl bicyclic nucleic acid
  source: /note="3' tri-ethylene glycol (TEG)"
ctguccaagc

SEQ ID NO: 21829 - DNA, 9 bp, Artificial Sequence
  source: /note="Description of Artificial Sequence: Synthetic oligonucleotide"
  source: /note="Description of Combined DNA/RNA Molecule: Synthetic oligonucleotide"
  source: /note="DNA/RNA"
  source: /note="5' tri-ethylene glycol (TEG)"
  modified_base (1)..(1): 5-methyl bicyclic nucleic acid
  modified_base (2)..(2): bicyclic nucleic acid (BNA)
  modified_base (5)..(5): 5-methyl modified nucleotide
  modified_base (6)..(6): 5-methyl modified nucleotide
  modified_base (8)..(8): bicyclic nucleic acid (BNA)
  modified_base (9)..(9): bicyclic nucleic acid (BNA)
  source: /note="3' tri-ethylene glycol (TEG)"
ctguccaag

SEQ ID NO: 21830 - DNA, 8 bp, Artificial Sequence
  source: /note="Description of Artificial Sequence: Synthetic oligonucleotide"
  source: /note="Description of Combined DNA/RNA Molecule: Synthetic oligonucleotide"
  source: /note="DNA/RNA"
  source: /note="5' tri-ethylene glycol (TEG)"
  modified_base (1)..(1): 5-methyl bicyclic nucleic acid
  modified_base (2)..(2): bicyclic nucleic acid (BNA)
  modified_base (5)..(5): 5-methyl modified nucleotide
  modified_base (6)..(6): 5-methyl modified nucleotide
  modified_base (7)..(7): bicyclic nucleic acid (BNA)
  modified_base (8)..(8): bicyclic nucleic acid (BNA)
  source: /note="3' tri-ethylene glycol (TEG)"
ctguccaa

SEQ ID NO: 21831 - DNA, 20 bp, Artificial Sequence
  source: /note="Description of Artificial Sequence: Synthetic oligonucleotide"
  source: /note="Description of Combined DNA/RNA Molecule: Synthetic oligonucleotide"
  source: /note="DNA/RNA"
  source: /note="5' tri-ethylene glycol (TEG)"
  modified_base (1)..(1): bicyclic nucleic acid (BNA)
  modified_base (2)..(2): bicyclic nucleic acid (BNA)
  modified_base (4)..(4): 5-methyl modified nucleotide
  modified_base (8)..(8): 5-methyl modified nucleotide
  modified_base (9)..(9): 5-methyl modified nucleotide
  modified_base (13)..(13): 5-methyl modified nucleotide
  modified_base (14)..(14): 5-methyl modified nucleotide
  modified_base (15)..(15): 5-methyl modified nucleotide
  modified_base (19)..(19): bicyclic nucleic acid (BNA)
  modified_base (20)..(20): bicyclic nucleic acid (BNA)
  source: /note="3' tri-ethylene glycol (TEG)"
gtucuguccaagcccggutg

SEQ ID NO: 21832 - DNA, 19 bp, Artificial Sequence
  source: /note="Description of Artificial Sequence: Synthetic oligonucleotide"
  source: /note="Description of Combined DNA/RNA Molecule: Synthetic oligonucleotide"
  source: /note="DNA/RNA"
  source: /note="5' tri-ethylene glycol (TEG)"
  modified_base (1)..(1): bicyclic nucleic acid (BNA)
  modified_base (2)..(2): bicyclic nucleic acid (BNA)
  modified_base (4)..(4): 5-methyl modified nucleotide
  modified_base (8)..(8): 5-methyl modified nucleotide
  modified_base (9)..(9): 5-methyl modified nucleotide
  modified_base (13)..(13): 5-methyl modified nucleotide
  modified_base (14)..(14): 5-methyl modified nucleotide
  modified_base (15)..(15): 5-methyl modified nucleotide
  modified_base (18)..(18): bicyclic nucleic acid (BNA)
  modified_base (19)..(19): bicyclic nucleic acid (BNA)
  source: /note="3' tri-ethylene glycol (TEG)"
gtucuguccaagcccggtt

SEQ ID NO: 21833 - DNA, 18 bp, Artificial Sequence
  source: /note="Description of Artificial Sequence: Synthetic oligonucleotide"
  source: /note="Description of Combined DNA/RNA Molecule: Synthetic oligonucleotide"
  source: /note="DNA/RNA"
  source: /note="5' tri-ethylene glycol (TEG)"
  modified_base (1)..(1): bicyclic nucleic acid (BNA)
  modified_base (2)..(2): bicyclic nucleic acid (BNA)
  modified_base (4)..(4): 5-methyl modified nucleotide
  modified_base (8)..(8): 5-methyl modified nucleotide
  modified_base (9)..(9): 5-methyl modified nucleotide
  modified_base (13)..(13): 5-methyl modified nucleotide
  modified_base (14)..(14): 5-methyl modified nucleotide
  modified_base (15)..(15): 5-methyl modified nucleotide
  modified_base (17)..(17): bicyclic nucleic acid (BNA)
  modified_base (18)..(18): bicyclic nucleic acid (BNA)
  source: /note="3' tri-ethylene glycol (TEG)"
gtucuguccaagcccggt

SEQ ID NO: 21834 - DNA, 17 bp, Artificial Sequence
  source: /note="Description of Artificial Sequence: Synthetic oligonucleotide"
  source: /note="Description of Combined DNA/RNA Molecule: Synthetic oligonucleotide"
  source: /note="DNA/RNA"
  source: /note="5' tri-ethylene glycol (TEG)"
  modified_base (1)..(1): bicyclic nucleic acid (BNA)
  modified_base (2)..(2): bicyclic nucleic acid (BNA)
  modified_base (4)..(4): 5-methyl modified nucleotide
  modified_base (8)..(8): 5-methyl modified nucleotide
  modified_base (9)..(9): 5-methyl modified nucleotide
  modified_base (13)..(13): 5-methyl modified nucleotide
  modified_base (14)..(14): 5-methyl modified nucleotide
  modified_base (15)..(15): 5-methyl modified nucleotide
  modified_base (16)..(16): bicyclic nucleic acid (BNA)
  modified_base (17)..(17): bicyclic nucleic acid (BNA)
  source: /note="3' tri-ethylene glycol (TEG)"
gtucuguccaagcccgg

SEQ ID NO: 21835 - DNA, 16 bp, Artificial Sequence
  source: /note="Description of Artificial Sequence: Synthetic oligonucleotide"
  source: /note="Description of Combined DNA/RNA Molecule: Synthetic oligonucleotide"
  source: /note="DNA/RNA"
  source: /note="5' tri-ethylene glycol (TEG)"
  modified_base (1)..(1): bicyclic nucleic acid (BNA)
  modified_base (2)..(2): bicyclic nucleic acid (BNA)
  modified_base (4)..(4): 5-methyl modified nucleotide
  modified_base (8)..(8): 5-methyl modified nucleotide
  modified_base (9)..(9): 5-methyl modified nucleotide
  modified_base (13)..(13): 5-methyl modified nucleotide
  modified_base (14)..(14): 5-methyl modified nucleotide
  modified_base (15)..(15): 5-methyl bicyclic nucleic acid
  modified_base (16)..(16): bicyclic nucleic acid (BNA)
  source: /note="3' tri-ethylene glycol (TEG)"
gtucuguccaagcccg

SEQ ID NO: 21836 - DNA, 15 bp, Artificial Sequence
  source: /note="Description of Artificial Sequence: Synthetic oligonucleotide"
  source: /note="Description of Combined DNA/RNA Molecule: Synthetic oligonucleotide"
  source: /note="DNA/RNA"
  source: /note="5' tri-ethylene glycol (TEG)"
  modified_base (1)..(1): bicyclic nucleic acid (BNA)
  modified_base (2)..(2): bicyclic nucleic acid (BNA)
  modified_base (4)..(4): 5-methyl modified nucleotide
  modified_base (8)..(8): 5-methyl modified nucleotide
  modified_base (9)..(9): 5-methyl modified nucleotide
  modified_base (13)..(13): 5-methyl modified nucleotide
  modified_base (14)..(14): 5-methyl bicyclic nucleic acid
  modified_base (15)..(15): 5-methyl bicyclic nucleic acid
  source: /note="3' tri-ethylene glycol (TEG)"
gtucuguccaagccc

SEQ ID NO: 21837 - DNA, 14 bp, Artificial Sequence
  source: /note="Description of Artificial Sequence: Synthetic oligonucleotide"
  source: /note="Description of Combined DNA/RNA Molecule: Synthetic oligonucleotide"
  source: /note="DNA/RNA"
  source: /note="5' tri-ethylene glycol (TEG)"
  modified_base (1)..(1): bicyclic nucleic acid (BNA)
  modified_base (2)..(2): bicyclic nucleic acid (BNA)
  modified_base (4)..(4): 5-methyl modified nucleotide
  modified_base (8)..(8): 5-methyl modified nucleotide
  modified_base (9)..(9): 5-methyl modified nucleotide
  modified_base (13)..(13): 5-methyl bicyclic nucleic acid
  modified_base (14)..(14): 5-methyl bicyclic nucleic acid
  source: /note="3' tri-ethylene glycol (TEG)"
gtucuguccaagcc

SEQ ID NO: 21838 - DNA, 13 bp, Artificial Sequence
  source: /note="Description of Artificial Sequence: Synthetic oligonucleotide"
  source: /note="Description of Combined DNA/RNA Molecule: Synthetic oligonucleotide"
  source: /note="DNA/RNA"
  source: /note="5' tri-ethylene glycol (TEG)"
  modified_base (1)..(1): bicyclic nucleic acid (BNA)
  modified_base (2)..(2): bicyclic nucleic acid (BNA)
  modified_base (4)..(4): 5-methyl modified nucleotide
  modified_base (8)..(8): 5-methyl modified nucleotide
  modified_base (9)..(9): 5-methyl modified nucleotide
  modified_base (12)..(12): bicyclic nucleic acid (BNA)
  modified_base (13)..(13): 5-methyl bicyclic nucleic acid
  source: /note="3' tri-ethylene glycol (TEG)"
gtucuguccaagc

SEQ ID NO: 21839 - DNA, 12 bp, Artificial Sequence
  source: /note="Description of Artificial Sequence: Synthetic oligonucleotide"
  source: /note="Description of Combined DNA/RNA Molecule: Synthetic oligonucleotide"
  source: /note="DNA/RNA"
  source: /note="5' tri-ethylene glycol (TEG)"
  modified_base (1)..(1): bicyclic nucleic acid (BNA)
  modified_base (2)..(2): bicyclic nucleic acid (BNA)
  modified_base (4)..(4): 5-methyl modified nucleotide
  modified_base (8)..(8): 5-methyl modified nucleotide
  modified_base (9)..(9): 5-methyl modified nucleotide
  modified_base (11)..(11): bicyclic nucleic acid (BNA)
  modified_base (12)..(12): bicyclic nucleic acid (BNA)
  source: /note="3' tri-ethylene glycol (TEG)"
gtucuguccaag

SEQ ID NO: 21840 - DNA, 11 bp, Artificial Sequence
  source: /note="Description of Artificial Sequence: Synthetic oligonucleotide"
  source: /note="Description of Combined DNA/RNA Molecule: Synthetic oligonucleotide"
  source: /note="DNA/RNA"
  source: /note="5' tri-ethylene glycol (TEG)"
  modified_base (1)..(1): bicyclic nucleic acid (BNA)
  modified_base (2)..(2): bicyclic nucleic acid (BNA)
  modified_base (4)..(4): 5-methyl modified nucleotide
  modified_base (8)..(8): 5-methyl modified nucleotide
  modified_base (9)..(9): 5-methyl modified nucleotide
  modified_base (10)..(10): bicyclic nucleic acid (BNA)
  modified_base (11)..(11): bicyclic nucleic acid (BNA)
  source: /note="3' tri-ethylene glycol (TEG)"
gtucuguccaa

SEQ ID NO: 21841 - DNA, 10 bp, Artificial Sequence
  source: /note="Description of Artificial Sequence: Synthetic oligonucleotide"
  source: /note="Description of Combined DNA/RNA Molecule: Synthetic oligonucleotide"
  source: /note="DNA/RNA"
  source: /note="5' tri-ethylene glycol (TEG)"
  modified_base (1)..(1): bicyclic nucleic acid (BNA)
  modified_base (2)..(2): bicyclic nucleic acid (BNA)
  modified_base (4)..(4): 5-methyl modified nucleotide
  modified_base (8)..(8): 5-methyl modified nucleotide
  modified_base (9)..(9): 5-methyl bicyclic nucleic acid
  modified_base (10)..(10): bicyclic nucleic acid (BNA)
  source: /note="3' tri-ethylene glycol (TEG)"
gtucugucca

SEQ ID NO: 21842 - DNA, 9 bp, Artificial Sequence
  source: /note="Description of Artificial Sequence: Synthetic oligonucleotide"
  source: /note="Description of Combined DNA/RNA Molecule: Synthetic oligonucleotide"
  source: /note="DNA/RNA"
  source: /note="5' tri-ethylene glycol (TEG)"
  modified_base (1)..(1): bicyclic nucleic acid (BNA)
  modified_base (2)..(2): bicyclic nucleic acid (BNA)
  modified_base (4)..(4): 5-methyl modified nucleotide
  modified_base (8)..(8): 5-methyl bicyclic nucleic acid
  modified_base (9)..(9): 5-methyl bicyclic nucleic acid
  source: /note="3' tri-ethylene glycol (TEG)"
gtucugucc

SEQ ID NO: 21843 - DNA, 8 bp, Artificial Sequence
  source: /note="Description of Artificial Sequence: Synthetic oligonucleotide"
  source: /note="Description of Combined DNA/RNA Molecule: Synthetic oligonucleotide"
  source: /note="DNA/RNA"
  source: /note="5' tri-ethylene glycol (TEG)"
  modified_base (1)..(1): bicyclic nucleic acid (BNA)
  modified_base (2)..(2): bicyclic nucleic acid (BNA)
  modified_base (4)..(4): 5-methyl modified nucleotide
  modified_base (7)..(7): bicyclic nucleic acid (BNA)
  modified_base (8)..(8): 5-methyl bicyclic nucleic acid
  source: /note="3' tri-ethylene glycol (TEG)"
gtucugtc

SEQ ID NO: 21844 - DNA, 20 bp, Artificial Sequence
  source: /note="Description of Artificial Sequence: Synthetic oligonucleotide"
  source: /note="Description of Combined DNA/RNA Molecule: Synthetic oligonucleotide"
  source: /note="DNA/RNA"
  source: /note="5' tri-ethylene glycol (TEG)"
  modified_base (1)..(1): bicyclic nucleic acid (BNA)
  modified_base (2)..(2): bicyclic nucleic acid (BNA)
  modified_base (5)..(5): 5-methyl modified nucleotide
  modified_base (9)..(9): 5-methyl modified nucleotide
  modified_base (10)..(10): 5-methyl modified nucleotide
  modified_base (14)..(14): 5-methyl modified nucleotide
  modified_base (15)..(15): 5-methyl modified nucleotide
  modified_base (16)..(16): 5-methyl modified nucleotide
  modified_base (19)..(19): bicyclic nucleic acid (BNA)
  modified_base (20)..(20): bicyclic nucleic acid (BNA)
  source: /note="3' tri-ethylene glycol (TEG)"
aguucuguccaagcccggtt

SEQ ID NO: 21845 - DNA, 19 bp, Artificial Sequence
  source: /note="Description of Artificial Sequence: Synthetic oligonucleotide"
  source: /note="Description of Combined DNA/RNA Molecule: Synthetic oligonucleotide"
  source: /note="DNA/RNA"
  source: /note="5' tri-ethylene glycol (TEG)"
  modified_base (1)..(1): bicyclic nucleic acid (BNA)
  modified_base (2)..(2): bicyclic nucleic acid (BNA)
  modified_base (5)..(5): 5-methyl modified nucleotide
  modified_base (9)..(9): 5-methyl modified nucleotide
  modified_base (10)..(10): 5-methyl modified nucleotide
  modified_base (14)..(14): 5-methyl modified nucleotide
  modified_base (15)..(15): 5-methyl modified nucleotide
  modified_base (16)..(16): 5-methyl modified nucleotide
  modified_base (18)..(18): bicyclic nucleic acid (BNA)
  modified_base (19)..(19): bicyclic nucleic acid (BNA)
  source: /note="3' tri-ethylene glycol (TEG)"
aguucuguccaagcccggt

SEQ ID NO: 21846 - RNA, 18 nt, Artificial Sequence
  source: /note="Description of Artificial Sequence: Synthetic oligonucleotide"
  source: /note="RNA"
  source: /note="5' tri-ethylene glycol (TEG)"
  modified_base (1)..(1): bicyclic nucleic acid (BNA)
  modified_base (2)..(2): bicyclic nucleic acid (BNA)
  modified_base (5)..(5): 5-methyl modified nucleotide
  modified_base (9)..(9): 5-methyl modified nucleotide
  modified_base (10)..(10): 5-methyl modified nucleotide
  modified_base (14)..(14): 5-methyl modified nucleotide
  modified_base (15)..(15): 5-methyl modified nucleotide
  modified_base (16)..(16): 5-methyl modified nucleotide
  modified_base (17)..(17): bicyclic nucleic acid (BNA)
  modified_base (18)..(18): bicyclic nucleic acid (BNA)
  source: /note="3' tri-ethylene glycol (TEG)"
aguucuguccaagcccgg

SEQ ID NO: 21847 - RNA, 17 nt, Artificial Sequence
  source: /note="Description of Artificial Sequence: Synthetic oligonucleotide"
  source: /note="RNA"
  source: /note="5' tri-ethylene glycol (TEG)"
  modified_base (1)..(1): bicyclic nucleic acid (BNA)
  modified_base (2)..(2): bicyclic nucleic acid (BNA)
  modified_base (5)..(5): 5-methyl modified nucleotide
  modified_base (9)..(9): 5-methyl modified nucleotide
  modified_base (10)..(10): 5-methyl modified nucleotide
  modified_base (14)..(14): 5-methyl modified nucleotide
  modified_base (15)..(15): 5-methyl modified nucleotide
  modified_base (16)..(16): 5-methyl bicyclic nucleic acid
  modified_base (17)..(17): bicyclic nucleic acid (BNA)
  source: /note="3' tri-ethylene glycol (TEG)"
aguucuguccaagcccg

SEQ ID NO: 21848 - RNA, 16 nt, Artificial Sequence
  source: /note="Description of Artificial Sequence: Synthetic oligonucleotide"
  source: /note="RNA"
  source: /note="5' tri-ethylene glycol (TEG)"
  modified_base (1)..(1): bicyclic nucleic acid (BNA)
  modified_base (2)..(2): bicyclic nucleic acid (BNA)
  modified_base (5)..(5): 5-methyl modified nucleotide
  modified_base (9)..(9): 5-methyl modified nucleotide
  modified_base (10)..(10): 5-methyl modified nucleotide
  modified_base (14)..(14): 5-methyl modified nucleotide
  modified_base (15)..(15): 5-methyl bicyclic nucleic acid
  modified_base (16)..(16): 5-methyl bicyclic nucleic acid
  source: /note="3' tri-ethylene glycol (TEG)"
aguucuguccaagccc

SEQ ID NO: 21849 - RNA, 15 nt, Artificial Sequence
  source: /note="Description of Artificial Sequence: Synthetic oligonucleotide"
  source: /note="RNA"
  source: /note="5' tri-ethylene glycol (TEG)"
  modified_base (1)..(1): bicyclic nucleic acid (BNA)
  modified_base (2)..(2): bicyclic nucleic acid (BNA)
  modified_base (5)..(5): 5-methyl modified nucleotide
  modified_base (9)..(9): 5-methyl modified nucleotide
  modified_base (10)..(10): 5-methyl modified nucleotide
  modified_base (14)..(14): 5-methyl bicyclic nucleic acid
  modified_base (15)..(15): 5-methyl bicyclic nucleic acid
  source: /note="3' tri-ethylene glycol (TEG)"
aguucuguccaagcc

SEQ ID NO: 21850 - RNA, 14 nt, Artificial Sequence
  source: /note="Description of Artificial Sequence: Synthetic oligonucleotide"
  source: /note="RNA"
  source: /note="5' tri-ethylene glycol (TEG)"
  modified_base (1)..(1): bicyclic nucleic acid (BNA)
  modified_base (2)..(2): bicyclic nucleic acid (BNA)
  modified_base (5)..(5): 5-methyl modified nucleotide
  modified_base (9)..(9): 5-methyl modified nucleotide
  modified_base (10)..(10): 5-methyl modified nucleotide
  modified_base (13)..(13): bicyclic nucleic acid (BNA)
  modified_base (14)..(14): 5-methyl bicyclic nucleic acid
  source: /note="3' tri-ethylene glycol (TEG)"
aguucuguccaagc

SEQ ID NO: 21851 - RNA, 13 nt, Artificial Sequence
  source: /note="Description of Artificial Sequence: Synthetic oligonucleotide"
  source: /note="RNA"
  source: /note="5' tri-ethylene glycol (TEG)"
  modified_base (1)..(1): bicyclic nucleic acid (BNA)
  modified_base (2)..(2): bicyclic nucleic acid (BNA)
  modified_base (5)..(5): 5-methyl modified nucleotide
  modified_base (9)..(9): 5-methyl modified nucleotide
  modified_base (10)..(10): 5-methyl modified nucleotide
  modified_base (12)..(12): bicyclic nucleic acid (BNA)
  modified_base (13)..(13): bicyclic nucleic acid (BNA)
  source: /note="3' tri-ethylene glycol (TEG)"
aguucuguccaag

SEQ ID NO: 21852 - RNA, 12 nt, Artificial Sequence
  source: /note="Description of Artificial Sequence: Synthetic oligonucleotide"
  source: /note="RNA"
  source: /note="5' tri-ethylene glycol (TEG)"
  modified_base (1)..(1): bicyclic nucleic acid (BNA)
  modified_base (2)..(2): bicyclic nucleic acid (BNA)
  modified_base (5)..(5): 5-methyl modified nucleotide
  modified_base (9)..(9): 5-methyl modified nucleotide
  modified_base (10)..(10): 5-methyl modified nucleotide
  modified_base (11)..(11): bicyclic nucleic acid (BNA)
  modified_base (12)..(12): bicyclic nucleic acid (BNA)
  source: /note="3' tri-ethylene glycol (TEG)"
aguucuguccaa

SEQ ID NO: 21853 - RNA, 11 nt, Artificial Sequence
  source: /note="Description of Artificial Sequence: Synthetic oligonucleotide"
  source: /note="RNA"
  source: /note="5' tri-ethylene glycol (TEG)"
  modified_base (1)..(1): bicyclic nucleic acid (BNA)
  modified_base (2)..(2): bicyclic nucleic acid (BNA)
  modified_base (5)..(5): 5-methyl modified nucleotide
  modified_base (9)..(9): 5-methyl modified nucleotide
  modified_base (10)..(10): 5-methyl bicyclic nucleic acid
  modified_base (11)..(11): bicyclic nucleic acid (BNA)
  source: /note="3' tri-ethylene glycol (TEG)"
aguucugucca

SEQ ID NO: 21854 - RNA, 10 nt, Artificial Sequence
  source: /note="Description of Artificial Sequence: Synthetic oligonucleotide"
  source: /note="RNA"
  source: /note="5' tri-ethylene glycol (TEG)"
  modified_base (1)..(1): bicyclic nucleic acid (BNA)
  modified_base (2)..(2): bicyclic nucleic acid (BNA)
  modified_base (5)..(5): 5-methyl modified nucleotide
  modified_base (9)..(9): 5-methyl bicyclic nucleic acid
  modified_base (10)..(10): 5-methyl bicyclic nucleic acid
  source: /note="3' tri-ethylene glycol (TEG)"
aguucugucc

SEQ ID NO: 21855 - DNA, 9 bp, Artificial Sequence
  source: /note="Description of Artificial Sequence: Synthetic oligonucleotide"
  source: /note="Description of Combined DNA/RNA Molecule: Synthetic oligonucleotide"
  source: /note="DNA/RNA"
  source: /note="5' tri-ethylene glycol (TEG)"
  modified_base (1)..(1): bicyclic nucleic acid (BNA)
  modified_base (2)..(2): bicyclic nucleic acid (BNA)
  modified_base (5)..(5): 5-methyl modified nucleotide
  modified_base (8)..(8): bicyclic nucleic acid (BNA)
  modified_base (9)..(9): 5-methyl bicyclic nucleic acid
  source: /note="3' tri-ethylene glycol (TEG)"
aguucugtc

SEQ ID NO: 21856 - DNA, 8 bp, Artificial Sequence
  source: /note="Description of Artificial Sequence: Synthetic oligonucleotide"
  source: /note="Description of Combined DNA/RNA Molecule: Synthetic oligonucleotide"
  source: /note="DNA/RNA"
  source: /note="5' tri-ethylene glycol (TEG)"
  modified_base (1)..(1): bicyclic nucleic acid (BNA)
  modified_base (2)..(2): bicyclic nucleic acid (BNA)
  modified_base (5)..(5): 5-methyl modified nucleotide
  modified_base (7)..(7): bicyclic nucleic acid (BNA)
  modified_base (8)..(8): bicyclic nucleic acid (BNA)
  source: /note="3' tri-ethylene glycol (TEG)"
aguucugt

SEQ ID NO: 21857 - DNA, 20 bp, Artificial Sequence
  source: /note="Description of Artificial Sequence: Synthetic oligonucleotide"
  source: /note="Description of Combined DNA/RNA Molecule: Synthetic oligonucleotide"
  source: /note="DNA/RNA"
  source: /note="5' tri-ethylene glycol (TEG)"
  modified_base (1)..(1): bicyclic nucleic acid (BNA)
  modified_base (2)..(2): bicyclic nucleic acid (BNA)
  modified_base (6)..(6): 5-methyl modified nucleotide
  modified_base (10)..(10): 5-methyl modified nucleotide
  modified_base (11)..(11): 5-methyl modified nucleotide
  modified_base (15)..(15): 5-methyl modified nucleotide
  modified_base (16)..(16): 5-methyl modified nucleotide
  modified_base (17)..(17): 5-methyl modified nucleotide
  modified_base (19)..(19): bicyclic nucleic acid (BNA)
  modified_base (20)..(20): bicyclic nucleic acid (BNA)
  source: /note="3' tri-ethylene glycol (TEG)"
aaguucuguccaagcccggt

SEQ ID NO: 21858 - RNA, 19 nt, Artificial Sequence
  source: /note="Description of Artificial Sequence: Synthetic oligonucleotide"
  source: /note="RNA"
  source: /note="5' tri-ethylene glycol (TEG)"
  modified_base (1)..(1): bicyclic nucleic acid (BNA)
  modified_base (2)..(2): bicyclic nucleic acid (BNA)
  modified_base (6)..(6): 5-methyl modified nucleotide
  modified_base (10)..(10): 5-methyl modified nucleotide
  modified_base (11)..(11): 5-methyl modified nucleotide
  modified_base (15)..(15): 5-methyl modified nucleotide
  modified_base (16)..(16): 5-methyl modified nucleotide
  modified_base (17)..(17): 5-methyl modified nucleotide
  modified_base (18)..(18): bicyclic nucleic acid (BNA)
  modified_base (19)..(19): bicyclic nucleic acid (BNA)
  source: /note="3' tri-ethylene glycol (TEG)"
aaguucuguccaagcccgg

SEQ ID NO: 21859 - RNA, 18 nt, Artificial Sequence
  source: /note="Description of Artificial Sequence: Synthetic oligonucleotide"
  source: /note="RNA"
  source: /note="5' tri-ethylene glycol (TEG)"
  modified_base (1)..(1): bicyclic nucleic acid (BNA)
  modified_base (2)..(2): bicyclic nucleic acid (BNA)
  modified_base (6)..(6): 5-methyl modified nucleotide
  modified_base (10)..(10): 5-methyl modified nucleotide
  modified_base (11)..(11): 5-methyl modified nucleotide
  modified_base (15)..(15): 5-methyl modified nucleotide
  modified_base (16)..(16): 5-methyl modified nucleotide
  modified_base (17)..(17): 5-methyl bicyclic nucleic acid
  modified_base (18)..(18): bicyclic nucleic acid (BNA)
  source: /note="3' tri-ethylene glycol (TEG)"
aaguucuguccaagcccg

SEQ ID NO: 21860 - RNA, 17 nt, Artificial Sequence
  source: /note="Description of Artificial Sequence: Synthetic oligonucleotide"
  source: /note="RNA"
  source: /note="5' tri-ethylene glycol (TEG)"
  modified_base (1)..(1): bicyclic nucleic acid (BNA)
  modified_base (2)..(2): bicyclic nucleic acid (BNA)
  modified_base (6)..(6): 5-methyl modified nucleotide
  modified_base (10)..(10): 5-methyl modified nucleotide
  modified_base (11)..(11): 5-methyl modified nucleotide
  modified_base (15)..(15): 5-methyl modified nucleotide
  modified_base (16)..(16): 5-methyl bicyclic nucleic acid
  modified_base (17)..(17): 5-methyl bicyclic nucleic acid
  source: /note="3' tri-ethylene glycol (TEG)"
aaguucuguccaagccc

SEQ ID NO: 21861 - RNA, 16 nt, Artificial Sequence
  source: /note="Description of Artificial Sequence: Synthetic oligonucleotide"
  source: /note="RNA"
  source: /note="5' tri-ethylene glycol (TEG)"
  modified_base (1)..(1): bicyclic nucleic acid (BNA)
  modified_base (2)..(2): bicyclic nucleic acid (BNA)
  modified_base (6)..(6): 5-methyl modified nucleotide
  modified_base (10)..(10): 5-methyl modified nucleotide
  modified_base (11)..(11): 5-methyl modified nucleotide
  modified_base (15)..(15): 5-methyl bicyclic nucleic acid
  modified_base (16)..(16): 5-methyl bicyclic nucleic acid
  source: /note="3' tri-ethylene glycol (TEG)"
aaguucuguccaagcc

SEQ ID NO: 21862 - RNA, 15 nt, Artificial Sequence
  source: /note="Description of Artificial Sequence: Synthetic oligonucleotide"
  source: /note="RNA"
  source: /note="5' tri-ethylene glycol (TEG)"
  modified_base (1)..(1): bicyclic nucleic acid (BNA)
  modified_base (2)..(2): bicyclic nucleic acid (BNA)
  modified_base (6)..(6): 5-methyl modified nucleotide
  modified_base (10)..(10): 5-methyl modified nucleotide
  modified_base (11)..(11): 5-methyl modified nucleotide
  modified_base (14)..(14): bicyclic nucleic acid (BNA)
  modified_base (15)..(15): 5-methyl bicyclic nucleic acid
  source: /note="3' tri-ethylene glycol (TEG)"
aaguucuguccaagc

SEQ ID NO: 21863 - RNA, 14 nt, Artificial Sequence
  source: /note="Description of Artificial Sequence: Synthetic oligonucleotide"
  source: /note="RNA"
  source: /note="5' tri-ethylene glycol (TEG)"
  modified_base (1)..(1): bicyclic nucleic acid (BNA)
  modified_base (2)..(2): bicyclic nucleic acid (BNA)
  modified_base (6)..(6): 5-methyl modified nucleotide
  modified_base (10)..(10): 5-methyl modified nucleotide
  modified_base (11)..(11): 5-methyl modified nucleotide
  modified_base (13)..(13): bicyclic nucleic acid (BNA)
  modified_base (14)..(14): bicyclic nucleic acid (BNA)
  source: /note="3' tri-ethylene glycol (TEG)"
aaguucuguccaag

SEQ ID NO: 21864 - RNA, 13 nt, Artificial Sequence
  source: /note="Description of Artificial Sequence: Synthetic oligonucleotide"
  source: /note="RNA"
  source: /note="5' tri-ethylene glycol (TEG)"
  modified_base (1)..(1): bicyclic nucleic acid (BNA)
  modified_base (2)..(2): bicyclic nucleic acid (BNA)
  modified_base (6)..(6): 5-methyl modified nucleotide
  modified_base (10)..(10): 5-methyl modified nucleotide
  modified_base (11)..(11): 5-methyl modified nucleotide
  modified_base (12)..(12): bicyclic nucleic acid (BNA)
  modified_base (13)..(13): bicyclic nucleic acid (BNA)
  source: /note="3' tri-ethylene glycol (TEG)"
aaguucuguccaa

SEQ ID NO: 21865 - RNA, 12 nt, Artificial Sequence
  source: /note="Description of Artificial Sequence: Synthetic oligonucleotide"
  source: /note="RNA"
  source: /note="5' tri-ethylene glycol (TEG)"
  modified_base (1)..(1): bicyclic nucleic acid (BNA)
  modified_base (2)..(2): bicyclic nucleic acid (BNA)
  modified_base (6)..(6): 5-methyl modified nucleotide
  modified_base (10)..(10): 5-methyl modified nucleotide
  modified_base (11)..(11): 5-methyl bicyclic nucleic acid
  modified_base (12)..(12): bicyclic nucleic acid (BNA)
  source: /note="3' tri-ethylene glycol (TEG)"
aaguucugucca

SEQ ID NO: 21866 - RNA, 11 nt, Artificial Sequence
  source: /note="Description of Artificial Sequence: Synthetic oligonucleotide"
  source: /note="RNA"
  source: /note="5' tri-ethylene glycol (TEG)"
  modified_base (1)..(1): bicyclic nucleic acid (BNA)
  modified_base (2)..(2): bicyclic nucleic acid (BNA)
  modified_base (6)..(6): 5-methyl modified nucleotide
  modified_base (10)..(10): 5-methyl bicyclic nucleic acid
  modified_base (11)..(11): 5-methyl bicyclic nucleic acid
  source: /note="3' tri-ethylene glycol (TEG)"
aaguucugucc

SEQ ID NO: 21867 - DNA, 10 bp, Artificial Sequence
  source: /note="Description of Artificial Sequence: Synthetic oligonucleotide"
  source: /note="Description of Combined DNA/RNA Molecule: Synthetic oligonucleotide"
  source: /note="DNA/RNA"
  source: /note="5' tri-ethylene glycol (TEG)"
  modified_base (1)..(1): bicyclic nucleic acid (BNA)
  modified_base (2)..(2): bicyclic nucleic acid (BNA)
  modified_base (6)..(6): 5-methyl modified nucleotide
  modified_base (9)..(9): bicyclic nucleic acid (BNA)
  modified_base (10)..(10): 5-methyl bicyclic nucleic acid
  source: /note="3' tri-ethylene glycol (TEG)"
aaguucugtc

SEQ ID NO: 21868 - DNA, 9 bp, Artificial Sequence
  source: /note="Description of Artificial Sequence: Synthetic oligonucleotide"
  source: /note="Description of Combined DNA/RNA Molecule: Synthetic oligonucleotide"
  source: /note="DNA/RNA"
  source: /note="5' tri-ethylene glycol (TEG)"
  modified_base (1)..(1): bicyclic nucleic acid (BNA)
  modified_base (2)..(2): bicyclic nucleic acid (BNA)
  modified_base (6)..(6): 5-methyl modified nucleotide
  modified_base (8)..(8): bicyclic nucleic acid (BNA)
  modified_base (9)..(9): bicyclic nucleic acid (BNA)
  source: /note="3' tri-ethylene glycol (TEG)"
aaguucugt

SEQ ID NO: 21869 - DNA, 8 bp, Artificial Sequence
  source: /note="Description of Artificial Sequence: Synthetic oligonucleotide"
  source: /note="Description of Combined DNA/RNA Molecule: Synthetic oligonucleotide"
  source: /note="DNA/RNA"
  source: /note="5' tri-ethylene glycol (TEG)"
  modified_base (1)..(1): bicyclic nucleic acid (BNA)
  modified_base (2)..(2): bicyclic nucleic acid (BNA)
  modified_base (6)..(6): 5-methyl modified nucleotide
  modified_base (7)..(7): bicyclic nucleic acid (BNA)
  modified_base (8)..(8): bicyclic nucleic acid (BNA)
  source: /note="3' tri-ethylene glycol (TEG)"
aaguuctg

SEQ ID NO: 21870 - DNA, 20 bp, Artificial Sequence
  source: /note="Description of Artificial Sequence: Synthetic oligonucleotide"
  source: /note="Description of Combined DNA/RNA Molecule: Synthetic oligonucleotide"
  source: /note="DNA/RNA"
  source: /note="5' tri-ethylene glycol (TEG)"
  modified_base (1)..(1): bicyclic nucleic acid (BNA)
  modified_base (2)..(2): bicyclic nucleic acid (BNA)
  modified_base (7)..(7): 5-methyl modified nucleotide
  modified_base (11)..(11): 5-methyl modified nucleotide
  modified_base (12)..(12): 5-methyl modified nucleotide
  modified_base (16)..(16): 5-methyl modified nucleotide
  modified_base (17)..(17): 5-methyl modified nucleotide
  modified_base (18)..(18): 5-methyl modified nucleotide
  modified_base (19)..(19): bicyclic nucleic acid (BNA)
  modified_base (20)..(20): bicyclic nucleic acid (BNA)
  source: /note="3' tri-ethylene glycol (TEG)"
taaguucuguccaagcccgg

SEQ ID NO: 21871 - DNA, 19 bp, Artificial Sequence
  source: /note="Description of Artificial Sequence: Synthetic oligonucleotide"
  source: /note="Description of Combined DNA/RNA Molecule: Synthetic oligonucleotide"
  source: /note="DNA/RNA"
  source: /note="5' tri-ethylene glycol (TEG)"
  modified_base (1)..(1): bicyclic nucleic acid (BNA)
  modified_base (2)..(2): bicyclic nucleic acid (BNA)
  modified_base (7)..(7): 5-methyl modified nucleotide
  modified_base (11)..(11): 5-methyl modified nucleotide
  modified_base (12)..(12): 5-methyl modified nucleotide
  modified_base (16)..(16): 5-methyl modified nucleotide
  modified_base (17)..(17): 5-methyl modified nucleotide
  modified_base (18)..(18): 5-methyl bicyclic nucleic acid
  modified_base (19)..(19): bicyclic nucleic acid (BNA)
  source: /note="3' tri-ethylene glycol (TEG)"
taaguucuguccaagcccg

SEQ ID NO: 21872 - DNA, 18 bp, Artificial Sequence
  source: /note="Description of Artificial Sequence: Synthetic oligonucleotide"
  source: /note="Description of Combined DNA/RNA Molecule: Synthetic oligonucleotide"
  source: /note="DNA/RNA"
  source: /note="5' tri-ethylene glycol (TEG)"
  modified_base (1)..(1): bicyclic nucleic acid (BNA)
  modified_base (2)..(2): bicyclic nucleic acid (BNA)
  modified_base (7)..(7): 5-methyl modified nucleotide
  modified_base (11)..(11): 5-methyl modified nucleotide
  modified_base (12)..(12): 5-methyl modified nucleotide
  modified_base (16)..(16): 5-methyl modified nucleotide
  modified_base (17)..(17): 5-methyl bicyclic nucleic acid
  modified_base (18)..(18): 5-methyl bicyclic nucleic acid
  source: /note="3' tri-ethylene glycol (TEG)"
taaguucuguccaagccc

SEQ ID NO: 21873 - DNA, 17 bp, Artificial Sequence
  source: /note="Description of Artificial Sequence: Synthetic oligonucleotide"
  source: /note="Description of Combined DNA/RNA Molecule: Synthetic oligonucleotide"
  source: /note="DNA/RNA"
  source: /note="5' tri-ethylene glycol (TEG)"
  modified_base (1)..(1): bicyclic nucleic acid (BNA)
  modified_base (2)..(2): bicyclic nucleic acid (BNA)
  modified_base (7)..(7): 5-methyl modified nucleotide
  modified_base (11)..(11): 5-methyl modified nucleotide
  modified_base (12)..(12): 5-methyl modified nucleotide
  modified_base (16)..(16): 5-methyl bicyclic nucleic acid
  modified_base (17)..(17): 5-methyl bicyclic nucleic acid
  source: /note="3' tri-ethylene glycol (TEG)"
taaguucuguccaagcc

SEQ ID NO: 21874 - DNA, 16 bp, Artificial Sequence
  source: /note="Description of Artificial Sequence: Synthetic oligonucleotide"
  source: /note="Description of Combined DNA/RNA Molecule: Synthetic oligonucleotide"
  source: /note="DNA/RNA"
  source: /note="5' tri-ethylene glycol (TEG)"
  modified_base (1)..(1): bicyclic nucleic acid (BNA)
  modified_base (2)..(2): bicyclic nucleic acid (BNA)
  modified_base (7)..(7): 5-methyl modified nucleotide
  modified_base (11)..(11): 5-methyl modified nucleotide
  modified_base (12)..(12): 5-methyl modified nucleotide
  modified_base (15)..(15): bicyclic nucleic acid (BNA)
  modified_base (16)..(16): 5-methyl bicyclic nucleic acid
  source: /note="3' tri-ethylene glycol (TEG)"
taaguucuguccaagc

SEQ ID NO: 21875 - DNA, 14 bp, Artificial Sequence
  source: /note="Description of Artificial Sequence: Synthetic oligonucleotide"
  source: /note="Description of Combined DNA/RNA Molecule: Synthetic oligonucleotide"
  source: /note="DNA/RNA"
  source: /note="5' tri-ethylene glycol (TEG)"
  modified_base (1)..(1): bicyclic nucleic acid (BNA)
  modified_base (2)..(2): bicyclic nucleic acid (BNA)
  modified_base (7)..(7): 5-methyl modified nucleotide
  modified_base (11)..(11): 5-methyl modified nucleotide
  modified_base (12)..(12): 5-methyl modified nucleotide
  modified_base (13)..(13): bicyclic nucleic acid (BNA)
  modified_base (14)..(14): bicyclic nucleic acid (BNA)
  source: /note="3' tri-ethylene glycol (TEG)"
taaguucuguccaa

SEQ ID NO: 21876 - DNA, 13 bp, Artificial Sequence
  source: /note="Description of Artificial Sequence: Synthetic oligonucleotide"
  source: /note="Description of Combined DNA/RNA Molecule: Synthetic oligonucleotide"
  source: /note="DNA/RNA"
  source: /note="5' tri-ethylene glycol (TEG)"
  modified_base (1)..(1): bicyclic nucleic acid (BNA)
  modified_base (2)..(2): bicyclic nucleic acid (BNA)
  modified_base (7)..(7): 5-methyl modified nucleotide
  modified_base (11)..(11): 5-methyl modified nucleotide
  modified_base (12)..(12): 5-methyl bicyclic nucleic acid
  modified_base (13)..(13): bicyclic nucleic acid (BNA)
  source: /note="3' tri-ethylene glycol (TEG)"
taaguucugucca

SEQ ID NO: 21877 - DNA, 12 bp, Artificial Sequence
  source: /note="Description of Artificial Sequence: Synthetic oligonucleotide"
  source: /note="Description of Combined DNA/RNA Molecule: Synthetic oligonucleotide"
  source: /note="DNA/RNA"
  source: /note="5' tri-ethylene glycol (TEG)"
  modified_base (1)..(1): bicyclic nucleic acid (BNA)
  modified_base (2)..(2): bicyclic nucleic acid (BNA)
  modified_base (7)..(7): 5-methyl modified nucleotide
  modified_base (11)..(11): 5-methyl bicyclic nucleic acid
  modified_base (12)..(12): 5-methyl bicyclic nucleic acid
  source: /note="3' tri-ethylene glycol (TEG)"
taaguucugucc

SEQ ID NO: 21878 - DNA, 11 bp, Artificial Sequence
  source: /note="Description of Artificial Sequence: Synthetic oligonucleotide"
  source: /note="Description of Combined DNA/RNA Molecule: Synthetic oligonucleotide"
  source: /note="DNA/RNA"
  source: /note="5' tri-ethylene glycol (TEG)"
  modified_base (1)..(1): bicyclic nucleic acid (BNA)
  modified_base (2)..(2): bicyclic nucleic acid (BNA)
  modified_base (7)..(7): 5-methyl modified nucleotide
  modified_base (10)..(10): bicyclic nucleic acid (BNA)
  modified_base (11)..(11): 5-methyl bicyclic nucleic acid
  source: /note="3' tri-ethylene glycol (TEG)"
taaguucugtc

SEQ ID NO: 21879 - DNA, 10 bp, Artificial Sequence
  source: /note="Description of Artificial Sequence: Synthetic oligonucleotide"
  source: /note="Description of Combined DNA/RNA Molecule: Synthetic oligonucleotide"
  source: /note="DNA/RNA"
  source: /note="5' tri-ethylene glycol (TEG)"
  modified_base (1)..(1): bicyclic nucleic acid (BNA)
  modified_base (2)..(2): bicyclic nucleic acid (BNA)
  modified_base (7)..(7): 5-methyl modified nucleotide
  modified_base (9)..(9): bicyclic nucleic acid (BNA)
  modified_base (10)..(10): bicyclic nucleic acid (BNA)
  source: /note="3' tri-ethylene glycol (TEG)"
taaguucugt

SEQ ID NO: 21880 - DNA, 9 bp, Artificial Sequence
  source: /note="Description of Artificial Sequence: Synthetic oligonucleotide"
  source: /note="Description of Combined DNA/RNA Molecule: Synthetic oligonucleotide"
  source: /note="DNA/RNA"
  source: /note="5' tri-ethylene glycol (TEG)"
  modified_base (1)..(1): bicyclic nucleic acid (BNA)
  modified_base (2)..(2): bicyclic nucleic acid (BNA)
  modified_base (7)..(7): 5-methyl modified nucleotide
  modified_base (8)..(8): bicyclic nucleic acid (BNA)
  modified_base (9)..(9): bicyclic nucleic acid (BNA)
  source: /note="3' tri-ethylene glycol (TEG)"
taaguuctg

SEQ ID NO: 21881 - DNA, 8 bp, Artificial Sequence
  source: /note="Description of Artificial Sequence: Synthetic oligonucleotide"
  source: /note="Description of Combined DNA/RNA Molecule: Synthetic oligonucleotide"
  source: /note="DNA/RNA"
  source: /note="5' tri-ethylene glycol (TEG)"
  modified_base (1)..(1): bicyclic nucleic acid (BNA)
  modified_base (2)..(2): bicyclic nucleic acid (BNA)
  modified_base (7)..(7): 5-methyl bicyclic nucleic acid
  modified_base (8)..(8): bicyclic nucleic acid (BNA)
  source: /note="3' tri-ethylene glycol (TEG)"
taaguuct

SEQ ID NO: 21882 - DNA, 20 bp, Artificial Sequence
  source: /note="Description of Artificial Sequence: Synthetic oligonucleotide"
  source: /note="Description of Combined DNA/RNA Molecule: Synthetic oligonucleotide"
  source: /note="DNA/RNA"
  source: /note="5' tri-ethylene glycol (TEG)"
  modified_base (1)..(1): bicyclic nucleic acid (BNA)
  modified_base (2)..(2): bicyclic nucleic acid (BNA)
  modified_base (8)..(8): 5-methyl modified nucleotide
  modified_base (12)..(12): 5-methyl modified nucleotide
  modified_base (13)..(13): 5-methyl modified nucleotide
  modified_base (17)..(17): 5-methyl modified nucleotide
  modified_base (18)..(18): 5-methyl modified nucleotide
  modified_base (19)..(19): 5-methyl bicyclic nucleic acid
  modified_base (20)..(20): bicyclic nucleic acid (BNA)
  source: /note="3' tri-ethylene glycol (TEG)"
gtaaguucuguccaagcccg

SEQ ID NO: 21883 - DNA, 19 bp, Artificial Sequence
  source: /note="Description of Artificial Sequence: Synthetic oligonucleotide"
  source: /note="Description of Combined DNA/RNA Molecule: Synthetic oligonucleotide"
  source: /note="DNA/RNA"
  source: /note="5' tri-ethylene glycol (TEG)"
  modified_base (1)..(1): bicyclic nucleic acid (BNA)
  modified_base (2)..(2): bicyclic nucleic acid (BNA)
  modified_base (8)..(8): 5-methyl modified nucleotide
  modified_base (12)..(12): 5-methyl modified nucleotide
  modified_base (13)..(13): 5-methyl modified nucleotide
  modified_base (17)..(17): 5-methyl modified nucleotide
  modified_base (18)..(18): 5-methyl bicyclic nucleic acid
  modified_base (19)..(19): 5-methyl bicyclic nucleic acid
  source: /note="3' tri-ethylene glycol (TEG)"
gtaaguucuguccaagccc

SEQ ID NO: 21884 - DNA, 17 bp, Artificial Sequence
  source: /note="Description of Artificial Sequence: Synthetic oligonucleotide"
  source: /note="Description of Combined DNA/RNA Molecule: Synthetic oligonucleotide"
  source: /note="DNA/RNA"
  source: /note="5' tri-ethylene glycol (TEG)"
  modified_base (1)..(1): bicyclic nucleic acid (BNA)
  modified_base (2)..(2): bicyclic nucleic acid (BNA)
  modified_base (8)..(8): 5-methyl modified nucleotide
  modified_base (12)..(12): 5-methyl modified nucleotide
  modified_base (13)..(13): 5-methyl modified nucleotide
  modified_base (16)..(16): bicyclic nucleic acid (BNA)
  modified_base (17)..(17): 5-methyl bicyclic nucleic acid
  source: /note="3' tri-ethylene glycol (TEG)"
gtaaguucuguccaagc

SEQ ID NO: 21885 - DNA, 16 bp, Artificial Sequence
  source: /note="Description of Artificial Sequence: Synthetic oligonucleotide"
  source: /note="Description of Combined DNA/RNA Molecule: Synthetic oligonucleotide"
  source: /note="DNA/RNA"
  source: /note="5' tri-ethylene glycol (TEG)"
  modified_base (1)..(1): bicyclic nucleic acid (BNA)
  modified_base (2)..(2): bicyclic nucleic acid (BNA)
  modified_base (8)..(8): 5-methyl modified nucleotide
  modified_base (12)..(12): 5-methyl modified nucleotide
  modified_base (13)..(13): 5-methyl modified nucleotide
  modified_base (15)..(15): bicyclic nucleic acid (BNA)
  modified_base (16)..(16): bicyclic nucleic acid (BNA)
  source: /note="3' tri-ethylene glycol (TEG)"
gtaaguucuguccaag

SEQ ID NO: 21886 - DNA, 15 bp, Artificial Sequence
  source: /note="Description of Artificial Sequence: Synthetic oligonucleotide"
  source: /note="Description of Combined DNA/RNA Molecule: Synthetic oligonucleotide"
  source: /note="DNA/RNA"
  source: /note="5' tri-ethylene glycol (TEG)"
  modified_base (1)..(1): bicyclic nucleic acid (BNA)
  modified_base (2)..(2): bicyclic nucleic acid (BNA)
  modified_base (8)..(8): 5-methyl modified nucleotide
  modified_base (12)..(12): 5-methyl modified nucleotide
  modified_base (13)..(13): 5-methyl modified nucleotide
  modified_base (14)..(14): bicyclic nucleic acid (BNA)
  modified_base (15)..(15): bicyclic nucleic acid (BNA)
  source: /note="3' tri-ethylene glycol (TEG)"
gtaaguucuguccaa

SEQ ID NO: 21887 - DNA, 14 bp, Artificial Sequence
  source: /note="Description of Artificial Sequence: Synthetic oligonucleotide"
  source: /note="Description of Combined DNA/RNA Molecule: Synthetic oligonucleotide"
  source: /note="DNA/RNA"
  source: /note="5' tri-ethylene glycol (TEG)"
  modified_base (1)..(1): bicyclic nucleic acid (BNA)
  modified_base (2)..(2): bicyclic nucleic acid (BNA)
  modified_base (8)..(8): 5-methyl modified nucleotide
  modified_base (12)..(12): 5-methyl modified nucleotide
  modified_base (13)..(13): 5-methyl bicyclic nucleic acid
  modified_base (14)..(14): bicyclic nucleic acid (BNA)
  source: /note="3' tri-ethylene glycol (TEG)"
gtaaguucugucca

SEQ ID NO: 21888 - DNA, 13 bp, Artificial Sequence
  source: /note="Description of Artificial Sequence: Synthetic oligonucleotide"
  source: /note="Description of Combined DNA/RNA Molecule: Synthetic oligonucleotide"
  source: /note="DNA/RNA"
  source: /note="5' tri-ethylene glycol (TEG)"
  modified_base (1)..(1): bicyclic nucleic acid (BNA)
  modified_base (2)..(2): bicyclic nucleic acid (BNA)
  modified_base (8)..(8): 5-methyl modified nucleotide
  modified_base (12)..(12): 5-methyl bicyclic nucleic acid
  modified_base (13)..(13): 5-methyl bicyclic nucleic acid
  source: /note="3' tri-ethylene glycol (TEG)"
gtaaguucugucc

SEQ ID NO: 21889 - DNA, 12 bp, Artificial Sequence
  source: /note="Description of Artificial Sequence: Synthetic oligonucleotide"
  source: /note="Description of Combined DNA/RNA Molecule: Synthetic oligonucleotide"
  source: /note="DNA/RNA"
  source: /note="5' tri-ethylene glycol (TEG)"
  modified_base (1)..(1): bicyclic nucleic acid (BNA)
  modified_base (2)..(2): bicyclic nucleic acid (BNA)
  modified_base (8)..(8): 5-methyl modified nucleotide
  modified_base (11)..(11): bicyclic nucleic acid (BNA)
  modified_base (12)..(12): 5-methyl bicyclic nucleic acid
  source: /note="3' tri-ethylene glycol (TEG)"
gtaaguucugtc

SEQ ID NO: 21890 - DNA, 11 bp, Artificial Sequence
  source: /note="Description of Artificial Sequence: Synthetic oligonucleotide"
  source: /note="Description of Combined DNA/RNA Molecule: Synthetic oligonucleotide"
  source: /note="DNA/RNA"
  source: /note="5' tri-ethylene glycol (TEG)"
  modified_base (1)..(1): bicyclic nucleic acid (BNA)
  modified_base (2)..(2): bicyclic nucleic acid (BNA)
  modified_base (8)..(8): 5-methyl modified nucleotide
  modified_base (10)..(10): bicyclic nucleic acid (BNA)
  modified_base (11)..(11): bicyclic nucleic acid (BNA)
  source: /note="3' tri-ethylene glycol (TEG)"
gtaaguucugt

SEQ ID NO: 21891 - DNA, 10 bp, Artificial Sequence
  source: /note="Description of Artificial Sequence: Synthetic oligonucleotide"
  source: /note="Description of Combined DNA/RNA Molecule: Synthetic oligonucleotide"
  source: /note="DNA/RNA"
  source: /note="5' tri-ethylene glycol (TEG)"
  modified_base (1)..(1): bicyclic nucleic acid (BNA)
  modified_base (2)..(2): bicyclic nucleic acid (BNA)
  modified_base (8)..(8): 5-methyl modified nucleotide
  modified_base (9)..(9): bicyclic nucleic acid (BNA)
  modified_base (10)..(10): bicyclic nucleic acid (BNA)
  source: /note="3' tri-ethylene glycol (TEG)"
gtaaguuctg

SEQ ID NO: 21892 - DNA, 9 bp, Artificial Sequence
  source: /note="Description of Artificial Sequence: Synthetic oligonucleotide"
  source: /note="Description of Combined DNA/RNA Molecule: Synthetic oligonucleotide"
  source: /note="DNA/RNA"
  source: /note="5' tri-ethylene glycol (TEG)"
  modified_base (1)..(1): bicyclic nucleic acid (BNA)
  modified_base (2)..(2): bicyclic nucleic acid (BNA)
  modified_base (8)..(8): 5-methyl bicyclic nucleic acid
  modified_base (9)..(9): bicyclic nucleic acid (BNA)
  source: /note="3' tri-ethylene glycol (TEG)"
gtaaguuct

SEQ ID NO: 21893 - DNA, 8 bp, Artificial Sequence
  source: /note="Description of Artificial Sequence: Synthetic oligonucleotide"
  source: /note="Description of Combined DNA/RNA Molecule: Synthetic oligonucleotide"
  source: /note="DNA/RNA"
  source: /note="5' tri-ethylene glycol (TEG)"
  modified_base (1)..(1): bicyclic nucleic acid (BNA)
  modified_base (2)..(2): bicyclic nucleic acid (BNA)
  modified_base (7)..(7): bicyclic nucleic acid (BNA)
  modified_base (8)..(8): 5-methyl bicyclic nucleic acid
  source: /note="3' tri-ethylene glycol (TEG)"
gtaagutc

SEQ ID NO: 21894 - RNA, 20 nt, Artificial Sequence
  source: /note="Description of Artificial Sequence: Synthetic oligonucleotide"
  source: /note="RNA"
  source: /note="5' tri-ethylene glycol (TEG)"
  modified_base (1)..(1): bicyclic nucleic acid (BNA)
  modified_base (2)..(2): bicyclic nucleic acid (BNA)
  modified_base (9)..(9): 5-methyl modified nucleotide
  modified_base (13)..(13): 5-methyl modified nucleotide
  modified_base (14)..(14): 5-methyl modified nucleotide
  modified_base (18)..(18): 5-methyl modified nucleotide
  modified_base (19)..(19): 5-methyl bicyclic nucleic acid
  modified_base (20)..(20): 5-methyl bicyclic nucleic acid
  source: /note="3' tri-ethylene glycol (TEG)"
gguaaguucuguccaagccc

SEQ ID NO: 21895 - RNA, 19 nt, Artificial Sequence
  source: /note="Description of Artificial Sequence: Synthetic oligonucleotide"
  source: /note="RNA"
  source: /note="5' tri-ethylene glycol (TEG)"
  modified_base (1)..(1): bicyclic nucleic acid (BNA)
  modified_base (2)..(2): bicyclic nucleic acid (BNA)
  modified_base (9)..(9): 5-methyl modified nucleotide
  modified_base (13)..(13): 5-methyl modified nucleotide
  modified_base (14)..(14): 5-methyl modified nucleotide
  modified_base (18)..(18): 5-methyl bicyclic nucleic acid
  modified_base (19)..(19): 5-methyl bicyclic nucleic acid
  source: /note="3' tri-ethylene glycol (TEG)"
gguaaguucuguccaagcc

SEQ ID NO: 21896 - RNA, 17 nt, Artificial Sequence
  source: /note="Description of Artificial Sequence: Synthetic oligonucleotide"
  source: /note="RNA"
  source: /note="5' tri-ethylene glycol (TEG)"
  modified_base (1)..(1): bicyclic nucleic acid (BNA)
  modified_base (2)..(2): bicyclic nucleic acid (BNA)
  modified_base (9)..(9): 5-methyl modified nucleotide
  modified_base (13)..(13): 5-methyl modified nucleotide
  modified_base (14)..(14): 5-methyl modified nucleotide
  modified_base (16)..(16): bicyclic nucleic acid (BNA)
  modified_base (17)..(17): bicyclic nucleic acid (BNA)
  source: /note="3' tri-ethylene glycol (TEG)"
gguaaguucuguccaag

SEQ ID NO: 21897 - RNA, 16 nt, Artificial Sequence
  source: /note="Description of Artificial Sequence: Synthetic oligonucleotide"
  source: /note="RNA"
  source: /note="5' tri-ethylene glycol (TEG)"
  modified_base (1)..(1): bicyclic nucleic acid (BNA)
  modified_base (2)..(2): bicyclic nucleic acid (BNA)
  modified_base (9)..(9): 5-methyl modified nucleotide
  modified_base (13)..(13): 5-methyl modified nucleotide
  modified_base (14)..(14): 5-methyl modified nucleotide
  modified_base (15)..(15): bicyclic nucleic acid (BNA)
  modified_base (16)..(16): bicyclic nucleic acid (BNA)
  source: /note="3' tri-ethylene glycol (TEG)"
gguaaguucuguccaa

SEQ ID NO: 21898 - RNA, 15 nt, Artificial Sequence
  source: /note="Description of Artificial Sequence: Synthetic oligonucleotide"
  source: /note="RNA"
  source: /note="5' tri-ethylene glycol (TEG)"
  modified_base (1)..(1): bicyclic nucleic acid (BNA)
  modified_base (2)..(2): bicyclic nucleic acid (BNA)
  modified_base (9)..(9): 5-methyl modified nucleotide
  modified_base (13)..(13): 5-methyl modified nucleotide
  modified_base (14)..(14): 5-methyl bicyclic nucleic acid
  modified_base (15)..(15): bicyclic nucleic acid (BNA)
  source: /note="3' tri-ethylene glycol (TEG)"
gguaaguucugucca

SEQ ID NO: 21899 - RNA, 14 nt, Artificial Sequence
  source: /note="Description of Artificial Sequence: Synthetic oligonucleotide"
  source: /note="RNA"
  source: /note="5' tri-ethylene glycol (TEG)"
  modified_base (1)..(1): bicyclic nucleic acid (BNA)
  modified_base (2)..(2): bicyclic nucleic acid (BNA)
  modified_base (9)..(9): 5-methyl modified nucleotide
  modified_base (13)..(13): 5-methyl bicyclic nucleic acid
  modified_base (14)..(14): 5-methyl bicyclic nucleic acid
  source: /note="3' tri-ethylene glycol (TEG)"
gguaaguucugucc

SEQ ID NO: 21900 - DNA, 13 bp, Artificial Sequence
  source: /note="Description of Artificial Sequence: Synthetic oligonucleotide"
  source: /note="Description of Combined DNA/RNA Molecule: Synthetic oligonucleotide"
  source: /note="DNA/RNA"
  source: /note="5' tri-ethylene glycol (TEG)"
  modified_base (1)..(1): bicyclic nucleic acid (BNA)
  modified_base (2)..(2): bicyclic nucleic acid (BNA)
  modified_base (9)..(9): 5-methyl modified nucleotide
  modified_base (12)..(12): bicyclic nucleic acid (BNA)
  modified_base (13)..(13): 5-methyl bicyclic nucleic acid
  source: /note="3' tri-ethylene glycol (TEG)"
gguaaguucugtc

SEQ ID NO: 21901 - DNA, 12 bp, Artificial Sequence
  source: /note="Description of Artificial Sequence: Synthetic oligonucleotide"
  source: /note="Description of Combined DNA/RNA Molecule: Synthetic oligonucleotide"
  source: /note="DNA/RNA"
  source: /note="5' tri-ethylene glycol (TEG)"
  modified_base (1)..(1): bicyclic nucleic acid (BNA)
  modified_base (2)..(2): bicyclic nucleic acid (BNA)
  modified_base (9)..(9): 5-methyl modified nucleotide
  modified_base (11)..(11): bicyclic nucleic acid (BNA)
  modified_base (12)..(12): bicyclic nucleic acid (BNA)
  source: /note="3' tri-ethylene glycol (TEG)"
gguaaguucugt

SEQ ID NO: 21902 - DNA, 11 bp, Artificial Sequence
  source: /note="Description of Artificial Sequence: Synthetic oligonucleotide"
  source: /note="Description of Combined DNA/RNA Molecule: Synthetic oligonucleotide"
  source: /note="DNA/RNA"
  source: /note="5' tri-ethylene glycol (TEG)"
  modified_base (1)..(1): bicyclic nucleic acid (BNA)
  modified_base (2)..(2): bicyclic nucleic acid (BNA)
  modified_base (9)..(9): 5-methyl modified nucleotide
  modified_base (10)..(10): bicyclic nucleic acid (BNA)
  modified_base (11)..(11): bicyclic nucleic acid (BNA)
  source: /note="3' tri-ethylene glycol (TEG)"
gguaaguuctg

SEQ ID NO: 21903 - DNA, 10 bp, Artificial Sequence
  source: /note="Description of Artificial Sequence: Synthetic oligonucleotide"
  source: /note="Description of Combined DNA/RNA Molecule: Synthetic oligonucleotide"
  source: /note="DNA/RNA"
  source: /note="5' tri-ethylene glycol (TEG)"
  modified_base (1)..(1): bicyclic nucleic acid (BNA)
  modified_base (2)..(2): bicyclic nucleic acid (BNA)
  modified_base (9)..(9): 5-methyl bicyclic nucleic acid
  modified_base (10)..(10): bicyclic nucleic acid (BNA)
  source: /note="3' tri-ethylene glycol (TEG)"
gguaaguuct

SEQ ID NO: 21904 - DNA, 9 bp, Artificial Sequence
  source: /note="Description of Artificial Sequence: Synthetic oligonucleotide"
  source: /note="Description of Combined DNA/RNA Molecule: Synthetic oligonucleotide"
  source: /note="DNA/RNA"
  source: /note="5' tri-ethylene glycol (TEG)"
  modified_base (1)..(1): bicyclic nucleic acid (BNA)
  modified_base (2)..(2): bicyclic nucleic acid (BNA)
  modified_base (8)..(8): bicyclic nucleic acid (BNA)
  modified_base (9)..(9): 5-methyl bicyclic nucleic acid
  source: /note="3' tri-ethylene glycol (TEG)"
gguaagutc

SEQ ID NO: 21905 - DNA, 8 bp, Artificial Sequence
  source: /note="Description of Artificial Sequence: Synthetic oligonucleotide"
  source: /note="Description of Combined DNA/RNA Molecule: Synthetic oligonucleotide"
  source: /note="DNA/RNA"
  source: /note="5' tri-ethylene glycol (TEG)"
  modified_base (1)..(1): bicyclic nucleic acid (BNA)
  modified_base (2)..(2): bicyclic nucleic acid (BNA)
  modified_base (7)..(7): bicyclic nucleic acid (BNA)
  modified_base (8)..(8): bicyclic nucleic acid (BNA)
  source: /note="3' tri-ethylene glycol (TEG)"
gguaagtt

SEQ ID NO: 21906 - RNA, 20 nt, Artificial Sequence
  source: /note="Description of Artificial Sequence: Synthetic oligonucleotide"
  source: /note="RNA"
  source: /note="5' tri-ethylene glycol (TEG)"
  modified_base (1)..(1): 5-methyl bicyclic nucleic acid
  modified_base (2)..(2): bicyclic nucleic acid (BNA)
  modified_base (10)..(10): 5-methyl modified nucleotide
  modified_base (14)..(14): 5-methyl modified nucleotide
  modified_base (15)..(15): 5-methyl modified nucleotide
  modified_base (19)..(19): 5-methyl bicyclic nucleic acid
  modified_base (20)..(20): 5-methyl bicyclic nucleic acid
  source: /note="3' tri-ethylene glycol (TEG)"
cgguaaguucuguccaagcc

SEQ ID NO: 21907 - RNA, 19 nt, Artificial Sequence
  source: /note="Description of Artificial Sequence: Synthetic oligonucleotide"
  source: /note="RNA"
  source: /note="5' tri-ethylene glycol (TEG)"
  modified_base (1)..(1): 5-methyl bicyclic nucleic acid
  modified_base (2)..(2): bicyclic nucleic acid (BNA)
  modified_base (10)..(10): 5-methyl modified nucleotide
  modified_base (14)..(14): 5-methyl modified nucleotide
  modified_base (15)..(15): 5-methyl modified nucleotide
  modified_base (18)..(18): bicyclic nucleic acid (BNA)
  modified_base (19)..(19): 5-methyl bicyclic nucleic acid
  source: /note="3' tri-ethylene glycol (TEG)"
cgguaaguucuguccaagc

SEQ ID NO: 21908 - RNA, 18 nt, Artificial Sequence
  source: /note="Description of Artificial Sequence: Synthetic oligonucleotide"
  source: /note="RNA"
  source: /note="5' tri-ethylene glycol (TEG)"
  modified_base (1)..(1): 5-methyl bicyclic nucleic acid
  modified_base (2)..(2): bicyclic nucleic acid (BNA)
  modified_base (10)..(10): 5-methyl modified nucleotide
  modified_base (14)..(14): 5-methyl modified nucleotide
  modified_base (15)..(15): 5-methyl modified nucleotide
  modified_base (17)..(17): bicyclic nucleic acid (BNA)
  modified_base (18)..(18): bicyclic nucleic acid (BNA)
  source: /note="3' tri-ethylene glycol (TEG)"
cgguaaguucuguccaag

SEQ ID NO: 21909 - RNA, 17 nt, Artificial Sequence
  source: /note="Description of Artificial Sequence: Synthetic oligonucleotide"
  source: /note="RNA"
  source: /note="5' tri-ethylene glycol (TEG)"
  modified_base (1)..(1): 5-methyl bicyclic nucleic acid
  modified_base (2)..(2): bicyclic nucleic acid (BNA)
  modified_base (10)..(10): 5-methyl modified nucleotide
  modified_base (14)..(14): 5-methyl modified nucleotide
  modified_base (15)..(15): 5-methyl modified nucleotide
  modified_base (16)..(16): bicyclic nucleic acid (BNA)
  modified_base (17)..(17): bicyclic nucleic acid (BNA)
  source: /note="3' tri-ethylene glycol (TEG)"
cgguaaguucuguccaa

SEQ ID NO: 21910 - RNA, 16 nt, Artificial Sequence
  source: /note="Description of Artificial Sequence: Synthetic oligonucleotide"
  source: /note="RNA"
  source: /note="5' tri-ethylene glycol (TEG)"
  modified_base (1)..(1): 5-methyl bicyclic nucleic acid
  modified_base (2)..(2): bicyclic nucleic acid (BNA)
  modified_base (10)..(10): 5-methyl modified nucleotide
  modified_base (14)..(14): 5-methyl modified nucleotide
  modified_base (15)..(15): 5-methyl bicyclic nucleic acid
  modified_base (16)..(16): bicyclic nucleic acid (BNA)
  source: /note="3' tri-ethylene glycol (TEG)"
cgguaaguucugucca

SEQ ID NO: 21911 - RNA, 15 nt, Artificial Sequence
  source: /note="Description of Artificial Sequence: Synthetic oligonucleotide"
  source: /note="RNA"
  source: /note="5' tri-ethylene glycol (TEG)"
  modified_base (1)..(1): 5-methyl bicyclic nucleic acid
  modified_base (2)..(2): bicyclic nucleic acid (BNA)
  modified_base (10)..(10): 5-methyl modified nucleotide
  modified_base (14)..(14): 5-methyl bicyclic nucleic acid
  modified_base (15)..(15): 5-methyl bicyclic nucleic acid
  source: /note="3' tri-ethylene glycol (TEG)"
cgguaaguucugucc

SEQ ID NO: 21912 - DNA, 14 bp, Artificial Sequence
  source: /note="Description of Artificial Sequence: Synthetic oligonucleotide"
  source: /note="Description of Combined DNA/RNA Molecule: Synthetic oligonucleotide"
  source: /note="DNA/RNA"
  source: /note="5' tri-ethylene glycol (TEG)"
  modified_base (1)..(1): 5-methyl bicyclic nucleic acid
  modified_base (2)..(2): bicyclic nucleic acid (BNA)
  modified_base (10)..(10): 5-methyl modified nucleotide
  modified_base (13)..(13): bicyclic nucleic acid (BNA)
  modified_base (14)..(14): 5-methyl bicyclic nucleic acid
  source: /note="3' tri-ethylene glycol (TEG)"
cgguaaguucugtc

SEQ ID NO: 21913 - DNA, 13 bp, Artificial Sequence
  source: /note="Description of Artificial Sequence: Synthetic oligonucleotide"
  source: /note="Description of Combined DNA/RNA Molecule: Synthetic oligonucleotide"
  source: /note="DNA/RNA"
  source: /note="5' tri-ethylene glycol (TEG)"
  modified_base (1)..(1): 5-methyl bicyclic nucleic acid
  modified_base (2)..(2): bicyclic nucleic acid (BNA)
  modified_base (10)..(10): 5-methyl modified nucleotide
  modified_base (12)..(12): bicyclic nucleic acid (BNA)
  modified_base (13)..(13): bicyclic nucleic acid (BNA)
  source: /note="3' tri-ethylene glycol (TEG)"
cgguaaguucugt

SEQ ID NO: 21914 - DNA, 12 bp, Artificial Sequence
  source: /note="Description of Artificial Sequence: Synthetic oligonucleotide"
  source: /note="Description of Combined DNA/RNA Molecule: Synthetic oligonucleotide"
  source: /note="DNA/RNA"
  source: /note="5' tri-ethylene glycol (TEG)"
  modified_base (1)..(1): 5-methyl bicyclic nucleic acid
  modified_base (2)..(2): bicyclic nucleic acid (BNA)
  modified_base (10)..(10): 5-methyl modified nucleotide
  modified_base (11)..(11): bicyclic nucleic acid (BNA)
  modified_base (12)..(12): bicyclic nucleic acid (BNA)
  source: /note="3' tri-ethylene glycol (TEG)"
cgguaaguuctg

SEQ ID NO: 21915 - DNA, 11 bp, Artificial Sequence
  source: /note="Description of Artificial Sequence: Synthetic oligonucleotide"
  source: /note="Description of Combined DNA/RNA Molecule: Synthetic oligonucleotide"
  source: /note="DNA/RNA"
  source: /note="5' tri-ethylene glycol (TEG)"
  modified_base (1)..(1): 5-methyl bicyclic nucleic acid
  modified_base (2)..(2): bicyclic nucleic acid (BNA)
  modified_base (10)..(10): 5-methyl bicyclic nucleic acid
  modified_base (11)..(11): bicyclic nucleic acid (BNA)
  source: /note="3' tri-ethylene glycol (TEG)"
cgguaaguuct

SEQ ID NO: 21916 - DNA, 10 bp, Artificial Sequence
  source: /note="Description of Artificial Sequence: Synthetic oligonucleotide"
  source: /note="Description of Combined DNA/RNA Molecule: Synthetic oligonucleotide"
  source: /note="DNA/RNA"
  source: /note="5' tri-ethylene glycol (TEG)"
  modified_base (1)..(1): 5-methyl bicyclic nucleic acid
  modified_base (2)..(2): bicyclic nucleic acid (BNA)
  modified_base (9)..(9): bicyclic nucleic acid (BNA)
  modified_base (10)..(10): 5-methyl bicyclic nucleic acid
  source: /note="3' tri-ethylene glycol (TEG)"
cgguaagutc

SEQ ID NO: 21917 - DNA, 9 bp, Artificial Sequence
  source: /note="Description of Artificial Sequence: Synthetic oligonucleotide"
  source: /note="Description of Combined DNA/RNA Molecule: Synthetic oligonucleotide"
  source: /note="DNA/RNA"
  source: /note="5' tri-ethylene glycol (TEG)"
  modified_base (1)..(1): 5-methyl bicyclic nucleic acid
  modified_base (2)..(2): bicyclic nucleic acid (BNA)
  modified_base (8)..(8): bicyclic nucleic acid (BNA)
  modified_base (9)..(9): bicyclic nucleic acid (BNA)
  source: /note="3' tri-ethylene glycol (TEG)"
cgguaagtt

SEQ ID NO: 21918 - DNA, 8 bp, Artificial Sequence
  source: /note="Description of Artificial Sequence: Synthetic oligonucleotide"
  source: /note="Description of Combined DNA/RNA Molecule: Synthetic oligonucleotide"
  source: /note="DNA/RNA"
  source: /note="5' tri-ethylene glycol (TEG)"
  modified_base (1)..(1): 5-methyl bicyclic nucleic acid
  modified_base (2)..(2): bicyclic nucleic acid (BNA)
  modified_base (7)..(7): bicyclic nucleic acid (BNA)
  modified_base (8)..(8): bicyclic nucleic acid (BNA)
  source: /note="3' tri-ethylene glycol (TEG)"
cgguaagt

SEQ ID NO: 21919 - DNA, 20 bp, Artificial Sequence
  source: /note="Description of Artificial Sequence: Synthetic oligonucleotide"
  source: /note="Description of Combined DNA/RNA Molecule: Synthetic oligonucleotide"
  source: /note="DNA/RNA"
  source: /note="5' tri-ethylene glycol (TEG)"
  modified_base (1)..(1): bicyclic nucleic acid (BNA)
  modified_base (2)..(2): 5-methyl bicyclic nucleic acid
  modified_base (11)..(11): 5-methyl modified nucleotide
  modified_base (15)..(15): 5-methyl modified nucleotide
  modified_base (16)..(16): 5-methyl modified nucleotide
  modified_base (19)..(19): bicyclic nucleic acid (BNA)
  modified_base (20)..(20): 5-methyl bicyclic nucleic acid
  source: /note="3' tri-ethylene glycol (TEG)"
tcgguaaguucuguccaagc

SEQ ID NO: 21920 - DNA, 19 bp, Artificial Sequence
  source: /note="Description of Artificial Sequence: Synthetic oligonucleotide"
  source: /note="Description of Combined DNA/RNA Molecule: Synthetic oligonucleotide"
  source: /note="DNA/RNA"
  source: /note="5' tri-ethylene glycol (TEG)"
  modified_base (1)..(1): bicyclic nucleic acid (BNA)
  modified_base (2)..(2): 5-methyl bicyclic nucleic acid
  modified_base (11)..(11): 5-methyl modified nucleotide
  modified_base (15)..(15): 5-methyl modified nucleotide
  modified_base (16)..(16): 5-methyl modified nucleotide
  modified_base (18)..(18): bicyclic nucleic acid (BNA)
  modified_base (19)..(19): bicyclic nucleic acid (BNA)
  source: /note="3' tri-ethylene glycol (TEG)"
tcgguaaguucuguccaag

SEQ ID NO: 21921 - DNA, 18 bp, Artificial Sequence
  source: /note="Description of Artificial Sequence: Synthetic oligonucleotide"
  source: /note="Description of Combined DNA/RNA Molecule: Synthetic oligonucleotide"
  source: /note="DNA/RNA"
  source: /note="5' tri-ethylene glycol (TEG)"
  modified_base (1)..(1): bicyclic nucleic acid (BNA)
  modified_base (2)..(2): 5-methyl bicyclic nucleic acid
  modified_base (11)..(11): 5-methyl modified nucleotide
  modified_base (15)..(15): 5-methyl modified nucleotide
  modified_base (16)..(16): 5-methyl modified nucleotide
  modified_base (17)..(17): bicyclic nucleic acid (BNA)
  modified_base (18)..(18): bicyclic nucleic acid (BNA)
  source: /note="3' tri-ethylene glycol (TEG)"
tcgguaaguucuguccaa

SEQ ID NO: 21922 - DNA, 17 bp, Artificial Sequence
  source: /note="Description of Artificial Sequence: Synthetic oligonucleotide"
  source: /note="Description of Combined DNA/RNA Molecule: Synthetic oligonucleotide"
  source: /note="DNA/RNA"
  source: /note="5' tri-ethylene glycol (TEG)"
  modified_base (1)..(1): bicyclic nucleic acid (BNA)
  modified_base (2)..(2): 5-methyl bicyclic nucleic acid
  modified_base (11)..(11): 5-methyl modified nucleotide
  modified_base (15)..(15): 5-methyl modified nucleotide
  modified_base (16)..(16): 5-methyl bicyclic nucleic acid
  modified_base (17)..(17): bicyclic nucleic acid (BNA)
  source: /note="3' tri-ethylene glycol (TEG)"
tcgguaaguucugucca

SEQ ID NO: 21923 - DNA, 16 bp, Artificial Sequence
  source: /note="Description of Artificial Sequence: Synthetic oligonucleotide"
  source: /note="Description of Combined DNA/RNA Molecule: Synthetic oligonucleotide"
  source: /note="DNA/RNA"
  source: /note="5' tri-ethylene glycol (TEG)"
  modified_base (1)..(1): bicyclic nucleic acid (BNA)
  modified_base (2)..(2): 5-methyl bicyclic nucleic acid
  modified_base (11)..(11): 5-methyl modified nucleotide
  modified_base (15)..(15): 5-methyl bicyclic nucleic acid
  modified_base (16)..(16): 5-methyl bicyclic nucleic acid
  source: /note="3' tri-ethylene glycol (TEG)"
tcgguaaguucugucc

SEQ ID NO: 21924 - DNA, 15 bp, Artificial Sequence
  source: /note="Description of Artificial Sequence: Synthetic oligonucleotide"
  source: /note="Description of Combined DNA/RNA Molecule: Synthetic oligonucleotide"
  source: /note="DNA/RNA"
  source: /note="5' tri-ethylene glycol (TEG)"
  modified_base (1)..(1): bicyclic nucleic acid (BNA)
  modified_base (2)..(2): 5-methyl bicyclic nucleic acid
  modified_base (11)..(11): 5-methyl modified nucleotide
  modified_base (14)..(14): bicyclic nucleic acid (BNA)
  modified_base (15)..(15): 5-methyl bicyclic nucleic acid
  source: /note="3' tri-ethylene glycol (TEG)"
tcgguaaguucugtc

SEQ ID NO: 21925 - DNA, 14 bp, Artificial Sequence
  source: /note="Description of Artificial Sequence: Synthetic oligonucleotide"
  source: /note="Description of Combined DNA/RNA Molecule: Synthetic oligonucleotide"
  source: /note="DNA/RNA"
  source: /note="5' tri-ethylene glycol (TEG)"
  modified_base (1)..(1): bicyclic nucleic acid (BNA)
  modified_base (2)..(2): 5-methyl bicyclic nucleic acid
  modified_base (11)..(11): 5-methyl modified nucleotide
  modified_base (13)..(13): bicyclic nucleic acid (BNA)
  modified_base (14)..(14): bicyclic nucleic acid (BNA)
  source: /note="3' tri-ethylene glycol (TEG)"
tcgguaaguucugt

SEQ ID NO: 21926 - DNA, 13 bp, Artificial Sequence
  source: /note="Description of Artificial Sequence: Synthetic oligonucleotide"
  source: /note="Description of Combined DNA/RNA Molecule: Synthetic oligonucleotide"
  source: /note="DNA/RNA"
  source: /note="5' tri-ethylene glycol (TEG)"
  modified_base (1)..(1): bicyclic nucleic acid (BNA)
  modified_base (2)..(2): 5-methyl bicyclic nucleic acid
  modified_base (11)..(11): 5-methyl modified nucleotide
  modified_base (12)..(12): bicyclic nucleic acid (BNA)
  modified_base (13)..(13): bicyclic nucleic acid (BNA)
  source: /note="3' tri-ethylene glycol (TEG)"
tcgguaaguuctg

SEQ ID NO: 21927 - DNA, 12 bp, Artificial Sequence
  source: /note="Description of Artificial Sequence: Synthetic oligonucleotide"
  source: /note="Description of Combined DNA/RNA Molecule: Synthetic oligonucleotide"
  source: /note="DNA/RNA"
  source: /note="5' tri-ethylene glycol (TEG)"
  modified_base (1)..(1): bicyclic nucleic acid (BNA)
  modified_base (2)..(2): 5-methyl bicyclic nucleic acid
  modified_base (11)..(11): 5-methyl bicyclic nucleic acid
  modified_base (12)..(12): bicyclic nucleic acid (BNA)
  source: /note="3' tri-ethylene glycol (TEG)"
tcgguaaguuct

SEQ ID NO: 21928 - DNA, 11 bp, Artificial Sequence
  source: /note="Description of Artificial Sequence: Synthetic oligonucleotide"
  source: /note="Description of Combined DNA/RNA Molecule: Synthetic oligonucleotide"
  source: /note="DNA/RNA"
  source: /note="5' tri-ethylene glycol (TEG)"
  modified_base (1)..(1): bicyclic nucleic acid (BNA)
  modified_base (2)..(2): 5-methyl bicyclic nucleic acid
  modified_base (10)..(10): bicyclic nucleic acid (BNA)
  modified_base (11)..(11): 5-methyl bicyclic nucleic acid
  source: /note="3' tri-ethylene glycol (TEG)"
tcgguaagutc

SEQ ID NO: 21929 - DNA, 10 bp, Artificial Sequence
  source: /note="Description of Artificial Sequence: Synthetic oligonucleotide"
  source: /note="Description of Combined DNA/RNA Molecule: Synthetic oligonucleotide"
  source: /note="DNA/RNA"
  source: /note="5' tri-ethylene glycol (TEG)"
  modified_base (1)..(1): bicyclic nucleic acid (BNA)
  modified_base (2)..(2): 5-methyl bicyclic nucleic acid
  modified_base (9)..(9): bicyclic nucleic acid (BNA)
  modified_base (10)..(10): bicyclic nucleic acid (BNA)
  source: /note="3' tri-ethylene glycol (TEG)"
tcgguaagtt

SEQ ID NO: 21930 - DNA, 9 bp, Artificial Sequence
  source: /note="Description of Artificial Sequence: Synthetic oligonucleotide"
  source: /note="Description of Combined DNA/RNA Molecule: Synthetic oligonucleotide"
  source: /note="DNA/RNA"
  source: /note="5' tri-ethylene glycol (TEG)"
  modified_base (1)..(1): bicyclic nucleic acid (BNA)
  modified_base (2)..(2): 5-methyl bicyclic nucleic acid
  modified_base (8)..(8): bicyclic nucleic acid (BNA)
  modified_base (9)..(9): bicyclic nucleic acid (BNA)
  source: /note="3' tri-ethylene glycol (TEG)"
tcgguaagt

SEQ ID NO: 21931 - DNA, 20 bp, Artificial Sequence
  source: /note="Description of Artificial Sequence: Synthetic oligonucleotide"
  source: /note="Description of Combined DNA/RNA Molecule: Synthetic oligonucleotide"
  source: /note="DNA/RNA"
  source: /note="5' tri-ethylene glycol (TEG)"
  modified_base (1)..(1): bicyclic nucleic acid (BNA)
  modified_base (2)..(2): bicyclic nucleic acid (BNA)
  modified_base (3)..(3): 5-methyl modified nucleotide
  modified_base (12)..(12): 5-methyl modified nucleotide
  modified_base (16)..(16): 5-methyl modified nucleotide
  modified_base (17)..(17): 5-methyl modified nucleotide
  modified_base (19)..(19): bicyclic nucleic acid (BNA)
  modified_base (20)..(20): bicyclic nucleic acid (BNA)
  source: /note="3' tri-ethylene glycol (TEG)"
gtcgguaaguucuguccaag

SEQ ID NO: 21932 - DNA, 19 bp, Artificial Sequence
  source: /note="Description of Artificial Sequence: Synthetic oligonucleotide"
  source: /note="Description of Combined DNA/RNA Molecule: Synthetic oligonucleotide"
  source: /note="DNA/RNA"
  source: /note="5' tri-ethylene glycol (TEG)"
  modified_base (1)..(1): bicyclic nucleic acid (BNA)
  modified_base (2)..(2): bicyclic nucleic acid (BNA)
  modified_base (3)..(3): 5-methyl modified nucleotide
  modified_base (12)..(12): 5-methyl modified nucleotide
  modified_base (16)..(16): 5-methyl modified nucleotide
  modified_base (17)..(17): 5-methyl modified nucleotide
  modified_base (18)..(18): bicyclic nucleic acid (BNA)
  modified_base (19)..(19): bicyclic nucleic acid (BNA)
  source: /note="3' tri-ethylene glycol (TEG)"
gtcgguaaguucuguccaa

SEQ ID NO: 21933 - DNA, 18 bp, Artificial Sequence
  source: /note="Description of Artificial Sequence: Synthetic oligonucleotide"
  source: /note="Description of Combined DNA/RNA Molecule: Synthetic oligonucleotide"
  source: /note="DNA/RNA"
  source: /note="5' tri-ethylene glycol (TEG)"
  modified_base (1)..(1): bicyclic nucleic acid (BNA)
  modified_base (2)..(2): bicyclic nucleic acid (BNA)
  modified_base (3)..(3): 5-methyl modified nucleotide
  modified_base (12)..(12): 5-methyl modified nucleotide
  modified_base (16)..(16): 5-methyl modified nucleotide
  modified_base (17)..(17): 5-methyl bicyclic nucleic acid
  modified_base (18)..(18): bicyclic nucleic acid (BNA)
  source: /note="3' tri-ethylene glycol (TEG)"
gtcgguaaguucugucca

SEQ ID NO: 21934 - DNA, 17 bp, Artificial Sequence
  source: /note="Description of Artificial Sequence: Synthetic oligonucleotide"
  source: /note="Description of Combined DNA/RNA Molecule: Synthetic oligonucleotide"
  source: /note="DNA/RNA"
  source: /note="5' tri-ethylene glycol (TEG)"
  modified_base (1)..(1): bicyclic nucleic acid (BNA)
  modified_base (2)..(2): bicyclic nucleic acid (BNA)
  modified_base (3)..(3): 5-methyl modified nucleotide
  modified_base (12)..(12): 5-methyl modified nucleotide
  modified_base (16)..(16): 5-methyl bicyclic nucleic acid
  modified_base (17)..(17): 5-methyl bicyclic nucleic acid
  source: /note="3' tri-ethylene glycol (TEG)"
gtcgguaaguucugucc

SEQ ID NO: 21935 - DNA, 16 bp, Artificial Sequence
  source: /note="Description of Artificial Sequence: Synthetic oligonucleotide"
  source: /note="Description of Combined DNA/RNA Molecule: Synthetic oligonucleotide"
  source: /note="DNA/RNA"
  source: /note="5' tri-ethylene glycol (TEG)"
  modified_base (1)..(1): bicyclic nucleic acid (BNA)
  modified_base (2)..(2): bicyclic nucleic acid (BNA)
  modified_base (3)..(3): 5-methyl modified nucleotide
  modified_base (12)..(12): 5-methyl modified nucleotide
  modified_base (15)..(15): bicyclic nucleic acid (BNA)
  modified_base (16)..(16): 5-methyl bicyclic nucleic acid
  source: /note="3' tri-ethylene glycol (TEG)"
gtcgguaaguucugtc

SEQ ID NO: 21936 - DNA, 15 bp, Artificial Sequence
  source: /note="Description of Artificial Sequence: Synthetic oligonucleotide"
  source: /note="Description of Combined DNA/RNA Molecule: Synthetic oligonucleotide"
  source: /note="DNA/RNA"
  source: /note="5' tri-ethylene glycol (TEG)"
  modified_base (1)..(1): bicyclic nucleic acid (BNA)
  modified_base (2)..(2): bicyclic nucleic acid (BNA)
  modified_base (3)..(3): 5-methyl modified nucleotide
  modified_base (12)..(12): 5-methyl modified nucleotide
  modified_base (14)..(14): bicyclic nucleic acid (BNA)
  modified_base (15)..(15): bicyclic nucleic acid (BNA)
  source: /note="3' tri-ethylene glycol (TEG)"
gtcgguaaguucugt

SEQ ID NO: 21937 - DNA, 14 bp, Artificial Sequence
  source: /note="Description of Artificial Sequence: Synthetic oligonucleotide"
  source: /note="Description of Combined DNA/RNA Molecule: Synthetic oligonucleotide"
  source: /note="DNA/RNA"
  source: /note="5' tri-ethylene glycol (TEG)"
  modified_base (1)..(1): bicyclic nucleic acid (BNA)
  modified_base (2)..(2): bicyclic nucleic acid (BNA)
  modified_base (3)..(3): 5-methyl modified nucleotide
  modified_base (12)..(12): 5-methyl modified nucleotide
  modified_base (13)..(13): bicyclic nucleic acid (BNA)
  modified_base (14)..(14): bicyclic nucleic acid (BNA)
  source: /note="3' tri-ethylene glycol (TEG)"
gtcgguaaguuctg

SEQ ID NO: 21938 - DNA, 13 bp, Artificial Sequence
  source: /note="Description of Artificial Sequence: Synthetic oligonucleotide"
  source: /note="Description of Combined DNA/RNA Molecule: Synthetic oligonucleotide"
  source: /note="DNA/RNA"
  source: /note="5' tri-ethylene glycol (TEG)"
  modified_base (1)..(1): bicyclic nucleic acid (BNA)
  modified_base (2)..(2): bicyclic nucleic acid (BNA)
  modified_base (3)..(3): 5-methyl modified nucleotide
  modified_base (12)..(12): 5-methyl bicyclic nucleic acid
  modified_base (13)..(13): bicyclic nucleic acid (BNA)
  source: /note="3' tri-ethylene glycol (TEG)"
gtcgguaaguuct

SEQ ID NO: 21939 - DNA, 12 bp, Artificial Sequence
  source: /note="Description of Artificial Sequence: Synthetic oligonucleotide"
  source: /note="Description of Combined DNA/RNA Molecule: Synthetic oligonucleotide"
  source: /note="DNA/RNA"
  source: /note="5' tri-ethylene glycol (TEG)"
  modified_base (1)..(1): bicyclic nucleic acid (BNA)
  modified_base (2)..(2): bicyclic nucleic acid (BNA)
  modified_base (3)..(3): 5-methyl modified nucleotide
  modified_base (11)..(11): bicyclic nucleic acid (BNA)
  modified_base (12)..(12): 5-methyl bicyclic nucleic acid
  source: /note="3' tri-ethylene glycol (TEG)"
gtcgguaagutc

SEQ ID NO: 21940 - DNA, 11 bp, Artificial Sequence
  source: /note="Description of Artificial Sequence: Synthetic oligonucleotide"
  source: /note="Description of Combined DNA/RNA Molecule: Synthetic oligonucleotide"
  source: /note="DNA/RNA"
  source: /note="5' tri-ethylene glycol (TEG)"
  modified_base (1)..(1): bicyclic nucleic acid (BNA)
  modified_base (2)..(2): bicyclic nucleic acid (BNA)
  modified_base (3)..(3): 5-methyl modified nucleotide
  modified_base (10)..(10): bicyclic nucleic acid (BNA)
  modified_base (11)..(11): bicyclic nucleic acid (BNA)
  source: /note="3' tri-ethylene glycol (TEG)"
gtcgguaagtt

SEQ ID NO: 21941 - DNA, 10 bp, Artificial Sequence
  source: /note="Description of Artificial Sequence: Synthetic oligonucleotide"
  source: /note="Description of Combined DNA/RNA Molecule: Synthetic oligonucleotide"
  source: /note="DNA/RNA"
  source: /note="5' tri-ethylene glycol (TEG)"
  modified_base (1)..(1): bicyclic nucleic acid (BNA)
  modified_base (2)..(2): bicyclic nucleic acid (BNA)
  modified_base (3)..(3): 5-methyl modified nucleotide
  modified_base (9)..(9): bicyclic nucleic acid (BNA)
  modified_base (10)..(10): bicyclic nucleic acid (BNA)
  source: /note="3' tri-ethylene glycol (TEG)"
gtcgguaagt

SEQ ID NO: 21942 - RNA, 20 nt, Artificial Sequence
  source: /note="Description of Artificial Sequence: Synthetic oligonucleotide"
  source: /note="RNA"
  source: /note="5' tri-ethylene glycol (TEG)"
  modified_base (1)..(1): bicyclic nucleic acid (BNA)
  modified_base (2)..(2): bicyclic nucleic acid (BNA)
  modified_base (4)..(4): 5-methyl modified nucleotide
  modified_base (13)..(13): 5-methyl modified nucleotide
  modified_base (17)..(17): 5-methyl modified nucleotide
  modified_base (18)..(18): 5-methyl modified nucleotide
  modified_base (19)..(19): bicyclic nucleic acid (BNA)
  modified_base (20)..(20): bicyclic nucleic acid (BNA)
  source: /note="3' tri-ethylene glycol (TEG)"
agucgguaaguucuguccaa

SEQ ID NO: 21943 - RNA, 19 nt, Artificial Sequence
  source: /note="Description of Artificial Sequence: Synthetic oligonucleotide"
  source: /note="RNA"
  source: /note="5' tri-ethylene glycol (TEG)"
  modified_base (1)..(1): bicyclic nucleic acid (BNA)
  modified_base (2)..(2): bicyclic nucleic acid (BNA)
  modified_base (4)..(4): 5-methyl modified nucleotide
  modified_base (13)..(13): 5-methyl modified nucleotide
  modified_base (17)..(17): 5-methyl modified nucleotide
  modified_base (18)..(18): 5-methyl bicyclic nucleic acid
  modified_base (19)..(19): bicyclic nucleic acid (BNA)
  source: /note="3' tri-ethylene glycol (TEG)"
agucgguaaguucugucca

SEQ ID NO: 21944 - DNA, 17 bp, Artificial Sequence
  source: /note="Description of Artificial Sequence: Synthetic oligonucleotide"
  source: /note="Description of Combined DNA/RNA Molecule: Synthetic oligonucleotide"
  source: /note="DNA/RNA"
  source: /note="5' tri-ethylene glycol (TEG)"
  modified_base (1)..(1): bicyclic nucleic acid (BNA)
  modified_base (2)..(2): bicyclic nucleic acid (BNA)
  modified_base (4)..(4): 5-methyl modified nucleotide
  modified_base (13)..(13): 5-methyl modified nucleotide
  modified_base (16)..(16): bicyclic nucleic acid (BNA)
  modified_base (17)..(17): 5-methyl bicyclic nucleic acid
  source: /note="3' tri-ethylene glycol (TEG)"
agucgguaaguucugtc

SEQ ID NO: 21945 - DNA, 16 bp, Artificial Sequence
  source: /note="Description of Artificial Sequence: Synthetic oligonucleotide"
  source: /note="Description of Combined DNA/RNA Molecule: Synthetic oligonucleotide"
  source: /note="DNA/RNA"
  source: /note="5' tri-ethylene glycol (TEG)"
  modified_base (1)..(1): bicyclic nucleic acid (BNA)
  modified_base (2)..(2): bicyclic nucleic acid (BNA)
  modified_base (4)..(4): 5-methyl modified nucleotide
  modified_base (13)..(13): 5-methyl modified nucleotide
  modified_base (15)..(15): bicyclic nucleic acid (BNA)
  modified_base (16)..(16): bicyclic nucleic acid (BNA)
  source: /note="3' tri-ethylene glycol (TEG)"
agucgguaaguucugt

SEQ ID NO: 21946 - DNA, 15 bp, Artificial Sequence
  source: /note="Description of Artificial Sequence: Synthetic oligonucleotide"
  source: /note="Description of Combined DNA/RNA Molecule: Synthetic oligonucleotide"
  source: /note="DNA/RNA"
  source: /note="5' tri-ethylene glycol (TEG)"
  modified_base (1)..(1): bicyclic nucleic acid (BNA)
  modified_base (2)..(2): bicyclic nucleic acid (BNA)
  modified_base (4)..(4): 5-methyl modified nucleotide
  modified_base (13)..(13): 5-methyl modified nucleotide
  modified_base (14)..(14): bicyclic nucleic acid (BNA)
  modified_base (15)..(15): bicyclic nucleic acid (BNA)
  source: /note="3' tri-ethylene glycol (TEG)"
agucgguaaguuctg

SEQ ID NO: 21947 - DNA, 14 bp, Artificial Sequence
  source: /note="Description of Artificial Sequence: Synthetic oligonucleotide"
  source: /note="Description of Combined DNA/RNA Molecule: Synthetic oligonucleotide"
  source: /note="DNA/RNA"
  source: /note="5' tri-ethylene glycol (TEG)"
  modified_base (1)..(1): bicyclic nucleic acid (BNA)
  modified_base (2)..(2): bicyclic nucleic acid (BNA)
  modified_base (4)..(4): 5-methyl modified nucleotide
  modified_base (13)..(13): 5-methyl bicyclic nucleic acid
  modified_base (14)..(14): bicyclic nucleic acid (BNA)
  source: /note="3' tri-ethylene glycol (TEG)"
agucgguaaguuct

SEQ ID NO: 21948 - DNA, 13 bp, Artificial Sequence
  source: /note="Description of Artificial Sequence: Synthetic oligonucleotide"
  source: /note="Description of Combined DNA/RNA Molecule: Synthetic oligonucleotide"
  source: /note="DNA/RNA"
  source: /note="5' tri-ethylene glycol (TEG)"
  modified_base (1)..(1): bicyclic nucleic acid (BNA)
  modified_base (2)..(2): bicyclic nucleic acid (BNA)
  modified_base (4)..(4): 5-methyl modified nucleotide
  modified_base (12)..(12): bicyclic nucleic acid (BNA)
  modified_base (13)..(13): 5-methyl bicyclic nucleic acid
  source: /note="3' tri-ethylene glycol (TEG)"
agucgguaagutc

SEQ ID NO: 21949 - DNA, 12 bp, Artificial Sequence
  source: /note="Description of Artificial Sequence: Synthetic oligonucleotide"
  source: /note="Description of Combined DNA/RNA Molecule: Synthetic oligonucleotide"
  source: /note="DNA/RNA"
  source: /note="5' tri-ethylene glycol (TEG)"
  modified_base (1)..(1): bicyclic nucleic acid (BNA)
  modified_base (2)..(2): bicyclic nucleic acid (BNA)
  modified_base (4)..(4): 5-methyl modified nucleotide
  modified_base (11)..(11): bicyclic nucleic acid (BNA)
  modified_base (12)..(12): bicyclic nucleic acid (BNA)
  source: /note="3' tri-ethylene glycol (TEG)"
agucgguaagtt

SEQ ID NO: 21950 - DNA, 11 bp, Artificial Sequence
  source: /note="Description of Artificial Sequence: Synthetic oligonucleotide"
  source: /note="Description of Combined DNA/RNA Molecule: Synthetic oligonucleotide"
  source: /note="DNA/RNA"
  source: /note="5' tri-ethylene glycol (TEG)"
  modified_base (1)..(1): bicyclic nucleic acid (BNA)
  modified_base (2)..(2): bicyclic nucleic acid (BNA)
  modified_base (4)..(4): 5-methyl modified nucleotide
  modified_base (10)..(10): bicyclic nucleic acid (BNA)
  modified_base (11)..(11): bicyclic nucleic acid (BNA)
  source: /note="3' tri-ethylene glycol (TEG)"
agucgguaagt

SEQ ID NO: 21951 - RNA, 20 nt, Artificial Sequence
  source: /note="Description of Artificial Sequence: Synthetic oligonucleotide"
  source: /note="RNA"
  source: /note="5' tri-ethylene glycol (TEG)"
  modified_base (1)..(1): 5-methyl bicyclic nucleic acid
  modified_base (2)..(2): bicyclic nucleic acid (BNA)
  modified_base (5)..(5): 5-methyl modified nucleotide
  modified_base (14)..(14): 5-methyl modified nucleotide
  modified_base (18)..(18): 5-methyl modified nucleotide
  modified_base (19)..(19): 5-methyl bicyclic nucleic acid
  modified_base (20)..(20): bicyclic nucleic acid (BNA)
  source: /note="3' tri-ethylene glycol (TEG)"
cagucgguaaguucugucca

SEQ ID NO: 21952 - RNA, 19 nt, Artificial Sequence
  source: /note="Description of Artificial Sequence: Synthetic oligonucleotide"
  source: /note="RNA"
  source: /note="5' tri-ethylene glycol (TEG)"
  modified_base (1)..(1): 5-methyl bicyclic nucleic acid
  modified_base (2)..(2): bicyclic nucleic acid (BNA)
  modified_base (5)..(5): 5-methyl modified nucleotide
  modified_base (14)..(14): 5-methyl modified nucleotide
  modified_base (18)..(18): 5-methyl bicyclic nucleic acid
  modified_base (19)..(19): 5-methyl bicyclic nucleic acid
  source: /note="3' tri-ethylene glycol (TEG)"
cagucgguaaguucugucc

SEQ ID NO: 21953 - DNA, 18 bp, Artificial Sequence
  source: /note="Description of Artificial Sequence: Synthetic oligonucleotide"
  source: /note="Description of Combined DNA/RNA Molecule: Synthetic oligonucleotide"
  source: /note="DNA/RNA"
  source: /note="5' tri-ethylene glycol (TEG)"
  modified_base (1)..(1): 5-methyl bicyclic nucleic acid
  modified_base (2)..(2): bicyclic nucleic acid (BNA)
  modified_base (5)..(5): 5-methyl modified nucleotide
  modified_base (14)..(14): 5-methyl modified nucleotide
  modified_base (17)..(17): bicyclic nucleic acid (BNA)
  modified_base (18)..(18): 5-methyl bicyclic nucleic acid
  source: /note="3' tri-ethylene glycol (TEG)"
cagucgguaaguucugtc

SEQ ID NO: 21954 - DNA, 17 bp, Artificial Sequence
  source: /note="Description of Artificial Sequence: Synthetic oligonucleotide"
  source: /note="Description of Combined DNA/RNA Molecule: Synthetic oligonucleotide"
  source: /note="DNA/RNA"
  source: /note="5' tri-ethylene glycol (TEG)"
  modified_base (1)..(1): 5-methyl bicyclic nucleic acid
  modified_base (2)..(2): bicyclic nucleic acid (BNA)
  modified_base (5)..(5): 5-methyl modified nucleotide
  modified_base (14)..(14): 5-methyl modified nucleotide
  modified_base (16)..(16): bicyclic nucleic acid (BNA)
  modified_base (17)..(17): bicyclic nucleic acid (BNA)
  source: /note="3' tri-ethylene glycol (TEG)"
cagucgguaaguucugt

SEQ ID NO: 21955 - DNA, 16 bp, Artificial Sequence
  source: /note="Description of Artificial Sequence: Synthetic oligonucleotide"
  source: /note="Description of Combined DNA/RNA Molecule: Synthetic oligonucleotide"
  source: /note="DNA/RNA"
  source: /note="5' tri-ethylene glycol (TEG)"
  modified_base (1)..(1): 5-methyl bicyclic nucleic acid
  modified_base (2)..(2): bicyclic nucleic acid (BNA)
  modified_base (5)..(5): 5-methyl modified nucleotide
  modified_base (14)..(14): 5-methyl modified nucleotide
  modified_base (15)..(15): bicyclic nucleic acid (BNA)
  modified_base (16)..(16): bicyclic nucleic acid (BNA)
  source: /note="3' tri-ethylene glycol (TEG)"
cagucgguaaguuctg

SEQ ID NO: 21956 - DNA, 15 bp, Artificial Sequence
  source: /note="Description of Artificial Sequence: Synthetic oligonucleotide"
  source: /note="Description of Combined DNA/RNA Molecule: Synthetic oligonucleotide"
  source: /note="DNA/RNA"
  source: /note="5' tri-ethylene glycol (TEG)"
  modified_base (1)..(1): 5-methyl bicyclic nucleic acid
  modified_base (2)..(2): bicyclic nucleic acid (BNA)
  modified_base (5)..(5): 5-methyl modified nucleotide
  modified_base (14)..(14): 5-methyl bicyclic nucleic acid
  modified_base (15)..(15): bicyclic nucleic acid (BNA)
  source: /note="3' tri-ethylene glycol (TEG)"
cagucgguaaguuct

SEQ ID NO: 21957 - DNA, 14 bp, Artificial Sequence
  source: /note="Description of Artificial Sequence: Synthetic oligonucleotide"
  source: /note="Description of Combined DNA/RNA Molecule: Synthetic oligonucleotide"
  source: /note="DNA/RNA"
  source: /note="5' tri-ethylene glycol (TEG)"
  modified_base (1)..(1): 5-methyl bicyclic nucleic acid
  modified_base (2)..(2): bicyclic nucleic acid (BNA)
  modified_base (5)..(5): 5-methyl modified nucleotide
  modified_base (13)..(13): bicyclic nucleic acid (BNA)
  modified_base (14)..(14): 5-methyl bicyclic nucleic acid
  source: /note="3' tri-ethylene glycol (TEG)"
cagucgguaagutc

SEQ ID NO: 21958 - DNA, 13 bp, Artificial Sequence
  source: /note="Description of Artificial Sequence: Synthetic oligonucleotide"
  source: /note="Description of Combined DNA/RNA Molecule: Synthetic oligonucleotide"
  source: /note="DNA/RNA"
  source: /note="5' tri-ethylene glycol (TEG)"
  modified_base (1)..(1): 5-methyl bicyclic nucleic acid
  modified_base (2)..(2): bicyclic nucleic acid (BNA)
  modified_base (5)..(5): 5-methyl modified nucleotide
  modified_base (12)..(12): bicyclic nucleic acid (BNA)
  modified_base (13)..(13): bicyclic nucleic acid (BNA)
  source: /note="3' tri-ethylene glycol (TEG)"
cagucgguaagtt

SEQ ID NO: 21959 - DNA, 12 bp, Artificial Sequence
  source: /note="Description of Artificial Sequence: Synthetic oligonucleotide"
  source: /note="Description of Combined DNA/RNA Molecule: Synthetic oligonucleotide"
  source: /note="DNA/RNA"
  source: /note="5' tri-ethylene glycol (TEG)"
  modified_base (1)..(1): 5-methyl bicyclic nucleic acid
  modified_base (2)..(2): bicyclic nucleic acid (BNA)
  modified_base (5)..(5): 5-methyl modified nucleotide
  modified_base (11)..(11): bicyclic nucleic acid (BNA)
  modified_base (12)..(12): bicyclic nucleic acid (BNA)
  source: /note="3' tri-ethylene glycol (TEG)"
cagucgguaagt

SEQ ID NO: 21960 - RNA, 20 nt, Artificial Sequence
  source: /note="Description of Artificial Sequence: Synthetic oligonucleotide"
  source: /note="RNA"
  source: /note="5' tri-ethylene glycol (TEG)"
  modified_base (1)..(1): 5-methyl bicyclic nucleic acid
  modified_base (2)..(2): 5-methyl bicyclic nucleic acid
  modified_base (6)..(6): 5-methyl modified nucleotide
  modified_base (15)..(15): 5-methyl modified nucleotide
  modified_base (19)..(19): 5-methyl bicyclic nucleic acid
  modified_base (20)..(20): 5-methyl bicyclic nucleic acid
  source: /note="3' tri-ethylene glycol (TEG)"
ccagucgguaaguucugucc

SEQ ID NO: 21961 - DNA, 19 bp, Artificial Sequence
  source: /note="Description of Artificial Sequence: Synthetic oligonucleotide"
  source: /note="Description of Combined DNA/RNA Molecule: Synthetic oligonucleotide"
  source: /note="DNA/RNA"
  source: /note="5' tri-ethylene glycol (TEG)"
  modified_base (1)..(1): 5-methyl bicyclic nucleic acid
  modified_base (2)..(2): 5-methyl bicyclic nucleic acid
  modified_base (6)..(6): 5-methyl modified nucleotide
  modified_base (15)..(15): 5-methyl modified nucleotide
  modified_base (18)..(18): bicyclic nucleic acid (BNA)
  modified_base (19)..(19): 5-methyl bicyclic nucleic acid
  source: /note="3' tri-ethylene glycol (TEG)"
ccagucgguaaguucugtc

SEQ ID NO: 21962 - DNA, 18 bp, Artificial Sequence
  source: /note="Description of Artificial Sequence: Synthetic oligonucleotide"
  source: /note="Description of Combined DNA/RNA Molecule: Synthetic oligonucleotide"
  source: /note="DNA/RNA"
  source: /note="5' tri-ethylene glycol (TEG)"
  modified_base (1)..(1): 5-methyl bicyclic nucleic acid
  modified_base (2)..(2): 5-methyl bicyclic nucleic acid
  modified_base (6)..(6): 5-methyl modified nucleotide
  modified_base (15)..(15): 5-methyl modified nucleotide
  modified_base (17)..(17): bicyclic nucleic acid (BNA)
  modified_base (18)..(18): bicyclic nucleic acid (BNA)
  source: /note="3' tri-ethylene glycol (TEG)"
ccagucgguaaguucugt

SEQ ID NO: 21963 - DNA, 17 bp, Artificial Sequence
  source: /note="Description of Artificial Sequence: Synthetic oligonucleotide"
  source: /note="Description of Combined DNA/RNA Molecule: Synthetic oligonucleotide"
  source: /note="DNA/RNA"
  source: /note="5' tri-ethylene glycol (TEG)"
  modified_base (1)..(1): 5-methyl bicyclic nucleic acid
  modified_base (2)..(2): 5-methyl bicyclic nucleic acid
  modified_base (6)..(6): 5-methyl modified nucleotide
  modified_base (15)..(15): 5-methyl modified nucleotide
  modified_base (16)..(16): bicyclic nucleic acid (BNA)
  modified_base (17)..(17): bicyclic nucleic acid (BNA)
  source: /note="3' tri-ethylene glycol (TEG)"
ccagucgguaaguuctg

SEQ ID NO: 21964 - DNA, 16 bp, Artificial Sequence
  source: /note="Description of Artificial Sequence: Synthetic oligonucleotide"
  source: /note="Description of Combined DNA/RNA Molecule: Synthetic oligonucleotide"
  source: /note="DNA/RNA"
  source: /note="5' tri-ethylene glycol (TEG)"
  modified_base (1)..(1): 5-methyl bicyclic nucleic acid
  modified_base (2)..(2): 5-methyl bicyclic nucleic acid
  modified_base (6)..(6): 5-methyl modified nucleotide
  modified_base (15)..(15): 5-methyl bicyclic nucleic acid
  modified_base (16)..(16): bicyclic nucleic acid (BNA)
  source: /note="3' tri-ethylene glycol (TEG)"
ccagucgguaaguuct

SEQ ID NO: 21965 - DNA, 15 bp, Artificial Sequence
  source: /note="Description of Artificial Sequence: Synthetic oligonucleotide"
  source: /note="Description of Combined DNA/RNA Molecule: Synthetic oligonucleotide"
  source: /note="DNA/RNA"
  source: /note="5' tri-ethylene glycol (TEG)"
  modified_base (1)..(1): 5-methyl bicyclic nucleic acid
  modified_base (2)..(2): 5-methyl bicyclic nucleic acid
  modified_base (6)..(6): 5-methyl modified nucleotide
  modified_base (14)..(14): bicyclic nucleic acid (BNA)
  modified_base (15)..(15): 5-methyl bicyclic nucleic acid
  source: /note="3' tri-ethylene glycol (TEG)"
ccagucgguaagutc

SEQ ID NO: 21966 - DNA, 14 bp, Artificial Sequence
  source: /note="Description of Artificial Sequence: Synthetic oligonucleotide"
  source: /note="Description of Combined DNA/RNA Molecule: Synthetic oligonucleotide"
  source: /note="DNA/RNA"
  source: /note="5' tri-ethylene glycol (TEG)"
  modified_base (1)..(1): 5-methyl bicyclic nucleic acid
  modified_base (2)..(2): 5-methyl bicyclic nucleic acid
  modified_base (6)..(6): 5-methyl modified nucleotide
  modified_base (13)..(13): bicyclic nucleic acid (BNA)
  modified_base (14)..(14): bicyclic nucleic acid (BNA)
  source: /note="3' tri-ethylene glycol (TEG)"
ccagucgguaagtt

SEQ ID NO: 21967 - DNA, 13 bp, Artificial Sequence
  source: /note="Description of Artificial Sequence: Synthetic oligonucleotide"
  source: /note="Description of Combined DNA/RNA Molecule: Synthetic oligonucleotide"
  source: /note="DNA/RNA"
  source: /note="5' tri-ethylene glycol (TEG)"
  modified_base (1)..(1): 5-methyl bicyclic nucleic acid
  modified_base (2)..(2): 5-methyl bicyclic nucleic acid
  modified_base (6)..(6): 5-methyl modified nucleotide
  modified_base (12)..(12): bicyclic nucleic acid (BNA)
  modified_base (13)..(13): bicyclic nucleic acid (BNA)
  source: /note="3' tri-ethylene glycol (TEG)"
ccagucgguaagt

SEQ ID NO: 21968 - DNA, 20 bp, Artificial Sequence
  source: /note="Description of Artificial Sequence: Synthetic oligonucleotide"
  source: /note="Description of Combined DNA/RNA Molecule: Synthetic oligonucleotide"
  source: /note="DNA/RNA"
  source: /note="5' tri-ethylene glycol (TEG)"
  modified_base (1)..(1): bicyclic nucleic acid (BNA)
  modified_base (2)..(2): 5-methyl bicyclic nucleic acid
  modified_base (3)..(3): 5-methyl modified nucleotide
  modified_base (7)..(7): 5-methyl modified nucleotide
  modified_base (16)..(16): 5-methyl modified nucleotide
  modified_base (19)..(19): bicyclic nucleic acid (BNA)
  modified_base (20)..(20): 5-methyl bicyclic nucleic acid
  source: /note="3' tri-ethylene glycol (TEG)"
gccagucgguaaguucugtc

SEQ ID NO: 21969 - DNA, 19 bp, Artificial Sequence
  source: /note="Description of Artificial Sequence: Synthetic oligonucleotide"
  source: /note="Description of Combined DNA/RNA Molecule: Synthetic oligonucleotide"
  source: /note="DNA/RNA"
  source: /note="5' tri-ethylene glycol (TEG)"
  modified_base (1)..(1): bicyclic nucleic acid (BNA)
  modified_base (2)..(2): 5-methyl bicyclic nucleic acid
  modified_base (3)..(3): 5-methyl modified nucleotide
  modified_base (7)..(7): 5-methyl modified nucleotide
  modified_base (16)..(16): 5-methyl modified nucleotide
  modified_base (18)..(18): bicyclic nucleic acid (BNA)
  modified_base (19)..(19): bicyclic nucleic acid (BNA)
  source: /note="3' tri-ethylene glycol (TEG)"
gccagucgguaaguucugt

SEQ ID NO: 21970 - DNA, 18 bp, Artificial Sequence
  source: /note="Description of Artificial Sequence: Synthetic oligonucleotide"
  source: /note="Description of Combined DNA/RNA Molecule: Synthetic oligonucleotide"
  source: /note="DNA/RNA"
  source: /note="5' tri-ethylene glycol (TEG)"
  modified_base (1)..(1): bicyclic nucleic acid (BNA)
  modified_base (2)..(2): 5-methyl bicyclic nucleic acid
  modified_base (3)..(3): 5-methyl modified nucleotide
  modified_base (7)..(7): 5-methyl modified nucleotide
  modified_base (16)..(16): 5-methyl modified nucleotide
  modified_base (17)..(17): bicyclic nucleic acid (BNA)
  modified_base (18)..(18): bicyclic nucleic acid (BNA)
  source: /note="3' tri-ethylene glycol (TEG)"
gccagucgguaaguuctg

SEQ ID NO: 21971 - DNA, 17 bp, Artificial Sequence
  source: /note="Description of Artificial Sequence: Synthetic oligonucleotide"
  source: /note="Description of Combined DNA/RNA Molecule: Synthetic oligonucleotide"
  source: /note="DNA/RNA"
  source: /note="5' tri-ethylene glycol (TEG)"
  modified_base (1)..(1): bicyclic nucleic acid (BNA)
  modified_base (2)..(2): 5-methyl bicyclic nucleic acid
  modified_base (3)..(3): 5-methyl modified nucleotide
  modified_base (7)..(7): 5-methyl modified nucleotide
  modified_base (16)..(16): 5-methyl bicyclic nucleic acid
  modified_base (17)..(17): bicyclic nucleic acid (BNA)
  source: /note="3' tri-ethylene glycol (TEG)"
gccagucgguaaguuct

SEQ ID NO: 21972 - DNA, 16 bp, Artificial Sequence
  source: /note="Description of Artificial Sequence: Synthetic oligonucleotide"
  source: /note="Description of Combined DNA/RNA Molecule: Synthetic oligonucleotide"
  source: /note="DNA/RNA"
  source: /note="5' tri-ethylene glycol (TEG)"
  modified_base (1)..(1): bicyclic nucleic acid (BNA)
  modified_base (2)..(2): 5-methyl bicyclic nucleic acid
  modified_base (3)..(3): 5-methyl modified nucleotide
  modified_base (7)..(7): 5-methyl modified nucleotide
  modified_base (15)..(15): bicyclic nucleic acid (BNA)
  modified_base (16)..(16): 5-methyl bicyclic nucleic acid
  source: /note="3' tri-ethylene glycol (TEG)"
gccagucgguaagutc

SEQ ID NO: 21973 - DNA, 15 bp, Artificial Sequence
  source: /note="Description of Artificial Sequence: Synthetic oligonucleotide"
  source: /note="Description of Combined DNA/RNA Molecule: Synthetic oligonucleotide"
  source: /note="DNA/RNA"
  source: /note="5' tri-ethylene glycol (TEG)"
  modified_base (1)..(1): bicyclic nucleic acid (BNA)
  modified_base (2)..(2): 5-methyl bicyclic nucleic acid
  modified_base (3)..(3): 5-methyl modified nucleotide
  modified_base (7)..(7): 5-methyl modified nucleotide
  modified_base (14)..(14): bicyclic nucleic acid (BNA)
  modified_base (15)..(15): bicyclic nucleic acid (BNA)
  source: /note="3' tri-ethylene glycol (TEG)"
gccagucgguaagtt

SEQ ID NO: 21974 - DNA, 14 bp, Artificial Sequence
  source: /note="Description of Artificial Sequence: Synthetic oligonucleotide"
  source: /note="Description of Combined DNA/RNA Molecule: Synthetic oligonucleotide"
  source: /note="DNA/RNA"
  source: /note="5' tri-ethylene glycol (TEG)"
  modified_base (1)..(1): bicyclic nucleic acid (BNA)
  modified_base (2)..(2): 5-methyl bicyclic nucleic acid
  modified_base (3)..(3): 5-methyl modified nucleotide
  modified_base (7)..(7): 5-methyl modified nucleotide
  modified_base (13)..(13): bicyclic nucleic acid (BNA)
  modified_base (14)..(14): bicyclic nucleic acid (BNA)
  source: /note="3' tri-ethylene glycol (TEG)"
gccagucgguaagt

SEQ ID NO: 21975 - DNA, 20 bp, Artificial Sequence
  source: /note="Description of Artificial Sequence: Synthetic oligonucleotide"
  source: /note="Description of Combined DNA/RNA Molecule: Synthetic oligonucleotide"
  source: /note="DNA/RNA"
  source: /note="5' tri-ethylene glycol (TEG)"
  modified_base (1)..(1): bicyclic nucleic acid (BNA)
  modified_base (2)..(2): 5-methyl bicyclic nucleic acid
  modified_base (14)..(14): 5-methyl modified nucleotide
  modified_base (19)..(19): 5-methyl bicyclic nucleic acid
  modified_base (20)..(20): bicyclic nucleic acid (BNA)
  source: /note="3' tri-ethylene glycol (TEG)"
tcaaggaagauggcauuuct

SEQ ID NO: 21976 - DNA, 22 bp, Artificial Sequence
  source: /note="Description of Artificial Sequence: Synthetic oligonucleotide"
  source: /note="Description of Combined DNA/RNA Molecule: Synthetic oligonucleotide"
  source: /note="DNA/RNA"
  source: /note="5' tri-ethylene glycol (TEG)"
  modified_base (1)..(1): bicyclic nucleic acid (BNA)
  modified_base (2)..(2): 5-methyl bicyclic nucleic acid
  modified_base (14)..(14): 5-methyl modified nucleotide
  modified_base (19)..(19): 5-methyl modified nucleotide
  modified_base (21)..(21): bicyclic nucleic acid (BNA)
  modified_base (22)..(22): bicyclic nucleic acid (BNA)
  source: /note="3' tri-ethylene glycol (TEG)"
tcaaggaagauggcauuucuag

SEQ ID NO: 21977 - DNA, 16 bp, Artificial Sequence
  source: /note="Description of Artificial Sequence: Synthetic oligonucleotide"
  source: /note="Description of Combined DNA/RNA Molecule: Synthetic oligonucleotide"
  source: /note="DNA/RNA"
  source: /note="5' tri-ethylene glycol (TEG)"
  modified_base (1)..(1): bicyclic nucleic acid (BNA)
  modified_base (2)..(2): 5-methyl bicyclic nucleic acid
  modified_base (14)..(14): 5-methyl modified nucleotide
  modified_base (15)..(15): bicyclic nucleic acid (BNA)
  modified_base (16)..(16): bicyclic nucleic acid (BNA)
  source: /note="3' tri-ethylene glycol (TEG)"
tcaaggaagauggcat

SEQ ID NO: 21978 - DNA, 15 bp, Artificial Sequence
  source: /note="Description of Artificial Sequence: Synthetic oligonucleotide"
  source: /note="Description of Combined DNA/RNA Molecule: Synthetic oligonucleotide"
  source: /note="DNA/RNA"
  source: /note="5' tri-ethylene glycol (TEG)"
  modified_base (1)..(1): bicyclic nucleic acid (BNA)
  modified_base (2)..(2): bicyclic nucleic acid (BNA)
  modified_base (9)..(9): 5-methyl modified nucleotide
  modified_base (14)..(14): 5-methyl bicyclic nucleic acid
  modified_base (15)..(15): bicyclic nucleic acid (BNA)
  source: /note="3' tri-ethylene glycol (TEG)"
gaagauggcauuuct

SEQ ID NO: 21979 - DNA, 21 bp, Artificial Sequence
  source: /note="Description of Artificial Sequence: Synthetic oligonucleotide"
  source: /note="Description of Combined DNA/RNA Molecule: Synthetic oligonucleotide"
  source: /note="DNA/RNA"
  source: /note="5' tri-ethylene glycol (TEG)"
  modified_base (1)..(1): bicyclic nucleic acid (BNA)
  modified_base (2)..(2): 5-methyl bicyclic nucleic acid
  modified_base (14)..(14): 5-methyl modified nucleotide
  modified_base (19)..(19): 5-methyl modified nucleotide
  modified_base (20)..(20): bicyclic nucleic acid (BNA)
  modified_base (21)..(21): bicyclic nucleic acid (BNA)
  source: /note="3' tri-ethylene glycol (TEG)"
tcaaggaagauggcauuucta

SEQ ID NO: 21980 - DNA, 19 bp, Artificial Sequence
  source: /note="Description of Artificial Sequence: Synthetic oligonucleotide"
  source: /note="Description of Combined DNA/RNA Molecule: Synthetic oligonucleotide"
  source: /note="DNA/RNA"
  source: /note="5' tri-ethylene glycol (TEG)"
  modified_base (1)..(1): bicyclic nucleic acid (BNA)
  modified_base (2)..(2): 5-methyl bicyclic nucleic acid
  modified_base (14)..(14): 5-methyl modified nucleotide
  modified_base (18)..(18): bicyclic nucleic acid (BNA)
  modified_base (19)..(19): 5-methyl bicyclic nucleic acid
  source: /note="3' tri-ethylene glycol (TEG)"
tcaaggaagauggcauutc

SEQ ID NO: 21981 - DNA, 18 bp, Artificial Sequence
  source: /note="Description of Artificial Sequence: Synthetic oligonucleotide"
  source: /note="Description of Combined DNA/RNA Molecule: Synthetic oligonucleotide"
  source: /note="DNA/RNA"
  source: /note="5' tri-ethylene glycol (TEG)"
  modified_base (1)..(1): bicyclic nucleic acid (BNA)
  modified_base (2)..(2): 5-methyl bicyclic nucleic acid
  modified_base (14)..(14): 5-methyl modified nucleotide
  modified_base (17)..(17): bicyclic nucleic acid (BNA)
  modified_base (18)..(18): bicyclic nucleic acid (BNA)
  source: /note="3' tri-ethylene glycol (TEG)"
tcaaggaagauggcautt

SEQ ID NO: 21982 - DNA, 17 bp, Artificial Sequence
  source: /note="Description of Artificial Sequence: Synthetic oligonucleotide"
  source: /note="Description of Combined DNA/RNA Molecule: Synthetic oligonucleotide"
  source: /note="DNA/RNA"
  source: /note="5' tri-ethylene glycol (TEG)"
  modified_base (1)..(1): bicyclic nucleic acid (BNA)
  modified_base (2)..(2): 5-methyl bicyclic nucleic acid
  modified_base (14)..(14): 5-methyl modified nucleotide
  modified_base (16)..(16): bicyclic nucleic acid (BNA)
  modified_base (17)..(17): bicyclic nucleic acid (BNA)
  source: /note="3' tri-ethylene glycol (TEG)"
tcaaggaagauggcatt

SEQ ID NO: 21983 - DNA, 15 bp, Artificial Sequence
  source: /note="Description of Artificial Sequence: Synthetic oligonucleotide"
  source: /note="Description of Combined DNA/RNA Molecule: Synthetic oligonucleotide"
  source: /note="DNA/RNA"
  source: /note="5' tri-ethylene glycol (TEG)"
  modified_base (1)..(1): bicyclic nucleic acid (BNA)
  modified_base (2)..(2): 5-methyl bicyclic nucleic acid
  modified_base (14)..(14): 5-methyl bicyclic nucleic acid
  modified_base (15)..(15): bicyclic nucleic acid (BNA)
  source: /note="3' tri-ethylene glycol (TEG)"
tcaaggaagauggca

SEQ ID NO: 21984 - DNA, 14 bp, Artificial Sequence
  source: /note="Description of Artificial Sequence: Synthetic oligonucleotide"
  source: /note="Description of Combined DNA/RNA Molecule: Synthetic oligonucleotide"
  source: /note="DNA/RNA"
  source: /note="5' tri-ethylene glycol (TEG)"
  modified_base (1)..(1): bicyclic nucleic acid (BNA)
  modified_base (2)..(2): 5-methyl bicyclic nucleic acid
  modified_base (13)..(13): bicyclic nucleic acid (BNA)
  modified_base (14)..(14): 5-methyl bicyclic nucleic acid
  source: /note="3' tri-ethylene glycol (TEG)"
tcaaggaagauggc

SEQ ID NO: 21985 - DNA, 13 bp, Artificial Sequence
  source: /note="Description of Artificial Sequence: Synthetic oligonucleotide"
  source: /note="Description of Combined DNA/RNA Molecule: Synthetic oligonucleotide"
  source: /note="DNA/RNA"
  source: /note="5' tri-ethylene glycol (TEG)"
  modified_base (1)..(1): bicyclic nucleic acid (BNA)
  modified_base (2)..(2): 5-methyl bicyclic nucleic acid
  modified_base (12)..(12): bicyclic nucleic acid (BNA)
  modified_base (13)..(13): bicyclic nucleic acid (BNA)
  source: /note="3' tri-ethylene glycol (TEG)"
tcaaggaagaugg

SEQ ID NO: 21986 - DNA, 12 bp, Artificial Sequence
  source: /note="Description of Artificial Sequence: Synthetic oligonucleotide"
  source: /note="DNA/RNA"
  source: /note="5' tri-ethylene glycol (TEG)"
  modified_base (1)..(1): bicyclic nucleic acid (BNA)
  modified_base (2)..(2): 5-methyl bicyclic nucleic acid
  modified_base (11)..(11): bicyclic nucleic acid (BNA)
  modified_base (12)..(12): bicyclic nucleic acid (BNA)
  source: /note="3' tri-ethylene glycol (TEG)"
tcaaggaagatg

SEQ ID NO: 21987 - DNA, 11 bp, Artificial Sequence
  source: /note="Description of Artificial Sequence: Synthetic oligonucleotide"
  source: /note="DNA/RNA"
  source: /note="5' tri-ethylene glycol (TEG)"
  modified_base (1)..(1): bicyclic nucleic acid (BNA)
  modified_base (2)..(2): 5-methyl bicyclic nucleic acid
  modified_base (10)..(10): bicyclic nucleic acid (BNA)
  modified_base (11)..(11): bicyclic nucleic acid (BNA)
  source: /note="3' tri-ethylene glycol (TEG)"
tcaaggaagat

SEQ ID NO: 21988 - DNA, 10 bp, Artificial Sequence
  source: /note="Description of Artificial Sequence: Synthetic oligonucleotide"
  source: /note="DNA/RNA"
  source: /note="5' tri-ethylene glycol (TEG)"
  modified_base (1)..(1): bicyclic nucleic acid (BNA)
  modified_base (2)..(2): 5-methyl bicyclic nucleic acid
  modified_base (9)..(9): bicyclic nucleic acid (BNA)
  modified_base (10)..(10): bicyclic nucleic acid (BNA)
  source: /note="3' tri-ethylene glycol (TEG)"
tcaaggaaga

SEQ ID NO: 21989 - DNA, 9 bp, Artificial Sequence
  source: /note="Description of Artificial Sequence: Synthetic oligonucleotide"
  source: /note="DNA/RNA"
  source: /note="5' tri-ethylene glycol (TEG)"
  modified_base (1)..(1): bicyclic nucleic acid (BNA)
  modified_base (2)..(2): 5-methyl bicyclic nucleic acid
  modified_base (8)..(8): bicyclic nucleic acid (BNA)
  modified_base (9)..(9): bicyclic nucleic acid (BNA)
  source: /note="3' tri-ethylene glycol (TEG)"
tcaaggaag

SEQ ID NO: 21990 - RNA, 21 nt, Artificial Sequence
  source: /note="Description of Artificial Sequence: Synthetic oligonucleotide"
  source: /note="RNA"
  source: /note="5' tri-ethylene glycol (TEG)"
  modified_base (1)..(1): 5-methyl bicyclic nucleic acid
  modified_base (2)..(2): bicyclic nucleic acid (BNA)
  modified_base (13)..(13): 5-methyl modified nucleotide
  modified_base (18)..(18): 5-methyl modified nucleotide
  modified_base (20)..(20): bicyclic nucleic acid (BNA)
  modified_base (21)..(21): bicyclic nucleic acid (BNA)
  source: /note="3' tri-ethylene glycol (TEG)"
caaggaagauggcauuucuag

SEQ ID NO: 21991 - DNA, 20 bp, Artificial Sequence
  source: /note="Description of Artificial Sequence: Synthetic oligonucleotide"
  source: /note="Description of Combined DNA/RNA Molecule: Synthetic oligonucleotide"
  source: /note="DNA/RNA"
  source: /note="5' tri-ethylene glycol (TEG)"
  modified_base (1)..(1): 5-methyl bicyclic nucleic acid
  modified_base (2)..(2): bicyclic nucleic acid (BNA)
  modified_base (13)..(13): 5-methyl modified nucleotide
  modified_base (18)..(18): 5-methyl modified nucleotide
  modified_base (19)..(19): bicyclic nucleic acid (BNA)
  modified_base (20)..(20): bicyclic nucleic acid (BNA)
  source: /note="3' tri-ethylene glycol (TEG)"
caaggaagauggcauuucta

SEQ ID NO: 21992 - DNA, 19 bp, Artificial Sequence
  source: /note="Description of Artificial Sequence: Synthetic oligonucleotide"
  source: /note="Description of Combined DNA/RNA Molecule: Synthetic oligonucleotide"
  source: /note="DNA/RNA"
  source: /note="5' tri-ethylene glycol (TEG)"
  modified_base (1)..(1): 5-methyl bicyclic nucleic acid
  modified_base (2)..(2): bicyclic nucleic acid (BNA)
  modified_base (13)..(13): 5-methyl modified nucleotide
  modified_base (18)..(18): 5-methyl bicyclic nucleic acid
  modified_base (19)..(19): bicyclic nucleic acid (BNA)
  source: /note="3' tri-ethylene glycol (TEG)"
caaggaagauggcauuuct

SEQ ID NO: 21993 - DNA, 18 bp, Artificial Sequence
  source: /note="Description of Artificial Sequence: Synthetic oligonucleotide"
  source: /note="Description of Combined DNA/RNA Molecule: Synthetic oligonucleotide"
  source: /note="DNA/RNA"
  source: /note="5' tri-ethylene glycol (TEG)"
  modified_base (1)..(1): 5-methyl bicyclic nucleic acid
  modified_base (2)..(2): bicyclic nucleic acid (BNA)
  modified_base (13)..(13): 5-methyl modified nucleotide
  modified_base (17)..(17): bicyclic nucleic acid (BNA)
  modified_base (18)..(18): 5-methyl bicyclic nucleic acid
  source: /note="3' tri-ethylene glycol (TEG)"
caaggaagauggcauutc

SEQ ID NO: 21994 - DNA, 17 bp, Artificial Sequence
  source: /note="Description of Artificial Sequence: Synthetic oligonucleotide"
  source: /note="Description of Combined DNA/RNA Molecule: Synthetic oligonucleotide"
  source: /note="DNA/RNA"
  source: /note="5' tri-ethylene glycol (TEG)"
  modified_base (1)..(1): 5-methyl bicyclic nucleic acid
  modified_base (2)..(2): bicyclic nucleic acid (BNA)
  modified_base (13)..(13): 5-methyl modified nucleotide
  modified_base (16)..(16): bicyclic nucleic acid (BNA)
  modified_base (17)..(17): bicyclic nucleic acid (BNA)
  source: /note="3' tri-ethylene glycol (TEG)"
caaggaagauggcautt

SEQ ID NO: 21995 - DNA, 16 bp, Artificial Sequence
  source: /note="Description of Artificial Sequence: Synthetic oligonucleotide"
  source: /note="Description of Combined DNA/RNA Molecule: Synthetic oligonucleotide"
  source: /note="DNA/RNA"
  source: /note="5' tri-ethylene glycol (TEG)"
  modified_base (1)..(1): 5-methyl bicyclic nucleic acid
  modified_base (2)..(2): bicyclic nucleic acid (BNA)
  modified_base (13)..(13): 5-methyl modified nucleotide
  modified_base (15)..(15): bicyclic nucleic acid (BNA)
  modified_base (16)..(16): bicyclic nucleic acid (BNA)
  source: /note="3' tri-ethylene glycol (TEG)"
caaggaagauggcatt

SEQ ID NO: 21996 - DNA, 15 bp, Artificial Sequence
  source: /note="Description of Artificial Sequence: Synthetic oligonucleotide"
  source: /note="Description of Combined DNA/RNA Molecule: Synthetic oligonucleotide"
  source: /note="DNA/RNA"
  source: /note="5' tri-ethylene glycol (TEG)"
  modified_base (1)..(1): 5-methyl bicyclic nucleic acid
  modified_base (2)..(2): bicyclic nucleic acid (BNA)
  modified_base (13)..(13): 5-methyl modified nucleotide
  modified_base (14)..(14): bicyclic nucleic acid (BNA)
  modified_base (15)..(15): bicyclic nucleic acid (BNA)
  source: /note="3' tri-ethylene glycol (TEG)"
caaggaagauggcat

SEQ ID NO: 21997 - RNA, 14 nt, Artificial Sequence
  source: /note="Description of Artificial Sequence: Synthetic oligonucleotide"
  source: /note="RNA"
  source: /note="5' tri-ethylene glycol (TEG)"
  modified_base (1)..(1): 5-methyl bicyclic nucleic acid
  modified_base (2)..(2): bicyclic nucleic acid (BNA)
  modified_base (13)..(13): 5-methyl bicyclic nucleic acid
  modified_base (14)..(14): bicyclic nucleic acid (BNA)
  source: /note="3' tri-ethylene glycol (TEG)"
caaggaagauggca

SEQ ID NO: 21998 - RNA, 13 nt, Artificial Sequence
  source: /note="Description of Artificial Sequence: Synthetic oligonucleotide"
  source: /note="RNA"
  source: /note="5' tri-ethylene glycol (TEG)"
  modified_base (1)..(1): 5-methyl bicyclic nucleic acid
  modified_base (2)..(2): bicyclic nucleic acid (BNA)
  modified_base (12)..(12): bicyclic nucleic acid (BNA)
  modified_base (13)..(13): 5-methyl bicyclic nucleic acid
  source: /note="3' tri-ethylene glycol (TEG)"
caaggaagauggc

SEQ ID NO: 21999 - RNA, 12 nt, Artificial Sequence
  source: /note="Description of Artificial Sequence: Synthetic oligonucleotide"
  source: /note="RNA"
  source: /note="5' tri-ethylene glycol (TEG)"
  modified_base (1)..(1): 5-methyl bicyclic nucleic acid
  modified_base (2)..(2): bicyclic nucleic acid (BNA)
  modified_base (11)..(11): bicyclic nucleic acid (BNA)
  modified_base (12)..(12): bicyclic nucleic acid (BNA)
  source: /note="3' tri-ethylene glycol (TEG)"
caaggaagaugg

SEQ ID NO: 22000 - DNA, 11 bp, Artificial Sequence
  source: /note="Description of Artificial Sequence: Synthetic oligonucleotide"
  source: /note="DNA/RNA"
  source: /note="5' tri-ethylene glycol (TEG)"
  modified_base (1)..(1): 5-methyl bicyclic nucleic acid
  modified_base (2)..(2): bicyclic nucleic acid (BNA)
  modified_base (10)..(10): bicyclic nucleic acid (BNA)
  modified_base (11)..(11): bicyclic nucleic acid (BNA)
  source: /note="3' tri-ethylene glycol (TEG)"
caaggaagatg

SEQ ID NO: 22001 - DNA, 10 bp, Artificial Sequence
  source: /note="Description of Artificial Sequence: Synthetic oligonucleotide"
  source: /note="DNA/RNA"
  source: /note="5' tri-ethylene glycol (TEG)"
  modified_base (1)..(1): 5-methyl bicyclic nucleic acid
  modified_base (2)..(2): bicyclic nucleic acid (BNA)
  modified_base (9)..(9): bicyclic nucleic acid (BNA)
  modified_base (10)..(10): bicyclic nucleic acid (BNA)
  source: /note="3' tri-ethylene glycol (TEG)"
caaggaagat

SEQ ID NO: 22002 - RNA, 9 nt, Artificial Sequence
  source: /note="Description of Artificial Sequence: Synthetic oligonucleotide"
  source: /note="RNA/Antisense Oligonucleotide"
  source: /note="5' tri-ethylene glycol (TEG)"
  modified_base (1)..(1): 5-methyl bicyclic nucleic acid
  modified_base (2)..(2): bicyclic nucleic acid (BNA)
  modified_base (8)..(8): bicyclic nucleic acid (BNA)
  modified_base (9)..(9): bicyclic nucleic acid (BNA)
  source: /note="3' tri-ethylene glycol (TEG)"
caaggaaga

SEQ ID NO: 22003 - RNA, 8 nt, Artificial Sequence
  source: /note="Description of Artificial Sequence: Synthetic oligonucleotide"
  source: /note="RNA/Antisense Oligonucleotide"
  source: /note="5' tri-ethylene glycol (TEG)"
  modified_base (1)..(1): 5-methyl bicyclic nucleic acid
  modified_base (2)..(2): bicyclic nucleic acid (BNA)
  modified_base (7)..(7): bicyclic nucleic acid (BNA)
  modified_base (8)..(8): bicyclic nucleic acid (BNA)
  source: /note="3' tri-ethylene glycol (TEG)"
caaggaag

SEQ ID NO: 22004 - RNA, 20 nt, Artificial Sequence
  source: /note="Description of Artificial Sequence: Synthetic oligonucleotide"
  source: /note="RNA"
  source: /note="5' tri-ethylene glycol (TEG)"
  modified_base (1)..(1): bicyclic nucleic acid (BNA)
  modified_base (2)..(2): bicyclic nucleic acid (BNA)
  modified_base (12)..(12): 5-methyl modified nucleotide
  modified_base (17)..(17): 5-methyl modified nucleotide
  modified_base (19)..(19): bicyclic nucleic acid (BNA)
  modified_base (20)..(20): bicyclic nucleic acid (BNA)
  source: /note="3' tri-ethylene glycol (TEG)"
aaggaagauggcauuucuag

SEQ ID NO: 22005 - DNA, 19 bp, Artificial Sequence
  source: /note="Description of Artificial Sequence: Synthetic oligonucleotide"
  source: /note="Description of Combined DNA/RNA Molecule: Synthetic oligonucleotide"
  source: /note="DNA/RNA"
  source: /note="5' tri-ethylene glycol (TEG)"
  modified_base (1)..(1): bicyclic nucleic acid (BNA)
  modified_base (2)..(2): bicyclic nucleic acid (BNA)
  modified_base (12)..(12): 5-methyl modified nucleotide
  modified_base (17)..(17): 5-methyl modified nucleotide
  modified_base (18)..(18): bicyclic nucleic acid (BNA)
  modified_base (19)..(19): bicyclic nucleic acid (BNA)
  source: /note="3' tri-ethylene glycol (TEG)"
aaggaagauggcauuucta

SEQ ID NO: 22006 - DNA, 18 bp, Artificial Sequence
  source: /note="Description of Artificial Sequence: Synthetic oligonucleotide"
  source: /note="Description of Combined DNA/RNA Molecule: Synthetic oligonucleotide"
  source: /note="DNA/RNA"
  source: /note="5' tri-ethylene glycol (TEG)"
  modified_base (1)..(1): bicyclic nucleic acid (BNA)
  modified_base (2)..(2): bicyclic nucleic acid (BNA)
  modified_base (12)..(12): 5-methyl modified nucleotide
  modified_base (17)..(17): 5-methyl bicyclic nucleic acid
  modified_base (18)..(18): bicyclic nucleic acid (BNA)
  source: /note="3' tri-ethylene glycol (TEG)"
aaggaagauggcauuuct

SEQ ID NO: 22007 - DNA, 17 bp, Artificial Sequence
  source: /note="Description of Artificial Sequence: Synthetic oligonucleotide"
  source: /note="Description of Combined DNA/RNA Molecule: Synthetic oligonucleotide"
  source: /note="DNA/RNA"
  source: /note="5' tri-ethylene glycol (TEG)"
  modified_base (1)..(1): bicyclic nucleic acid (BNA)
  modified_base (2)..(2): bicyclic nucleic acid (BNA)
  modified_base (12)..(12): 5-methyl modified nucleotide
  modified_base (16)..(16): bicyclic nucleic acid (BNA)
  modified_base (17)..(17): 5-methyl bicyclic nucleic acid
  source: /note="3' tri-ethylene glycol (TEG)"
aaggaagauggcauutc

SEQ ID NO: 22008 - DNA, 16 bp, Artificial Sequence
  source: /note="Description of Artificial Sequence: Synthetic oligonucleotide"
  source: /note="Description of Combined DNA/RNA Molecule: Synthetic oligonucleotide"
  source: /note="DNA/RNA"
  source: /note="5' tri-ethylene glycol (TEG)"
  modified_base (1)..(1): bicyclic nucleic acid (BNA)
  modified_base (2)..(2): bicyclic nucleic acid (BNA)
  modified_base (12)..(12): 5-methyl modified nucleotide
  modified_base (15)..(15): bicyclic nucleic acid (BNA)
  modified_base (16)..(16): bicyclic nucleic acid (BNA)
  source: /note="3' tri-ethylene glycol (TEG)"
aaggaagauggcautt

SEQ ID NO: 22009 - DNA, 15 bp, Artificial Sequence
  source: /note="Description of Artificial Sequence: Synthetic oligonucleotide"
  source: /note="Description of Combined DNA/RNA Molecule: Synthetic oligonucleotide"
  source: /note="DNA/RNA"
  source: /note="5' tri-ethylene glycol (TEG)"
  modified_base (1)..(1): bicyclic nucleic acid (BNA)
  modified_base (2)..(2): bicyclic nucleic acid (BNA)
  modified_base (12)..(12): 5-methyl modified nucleotide
  modified_base (14)..(14): bicyclic nucleic acid (BNA)
  modified_base (15)..(15): bicyclic nucleic acid (BNA)
  source: /note="3' tri-ethylene glycol (TEG)"
aaggaagauggcatt

SEQ ID NO: 22010 - DNA, 14 bp, Artificial Sequence
  source: /note="Description of Artificial Sequence: Synthetic oligonucleotide"
  source: /note="Description of Combined DNA/RNA Molecule: Synthetic oligonucleotide"
  source: /note="DNA/RNA"
  source: /note="5' tri-ethylene glycol (TEG)"
  modified_base (1)..(1): bicyclic nucleic acid (BNA)
  modified_base (2)..(2): bicyclic nucleic acid (BNA)
  modified_base (12)..(12): 5-methyl modified nucleotide
  modified_base (13)..(13): bicyclic nucleic acid (BNA)
  modified_base (14)..(14): bicyclic nucleic acid (BNA)
  source: /note="3' tri-ethylene glycol (TEG)"
aaggaagauggcat

SEQ ID NO: 22011 - RNA, 13 nt, Artificial Sequence
  source: /note="Description of Artificial Sequence: Synthetic oligonucleotide"
  source: /note="RNA"
  source: /note="5' tri-ethylene glycol (TEG)"
  modified_base (1)..(1): bicyclic nucleic acid (BNA)
  modified_base (2)..(2): bicyclic nucleic acid (BNA)
  modified_base (12)..(12): 5-methyl bicyclic nucleic acid
  modified_base (13)..(13): bicyclic nucleic acid (BNA)
  source: /note="3' tri-ethylene glycol (TEG)"
aaggaagauggca

SEQ ID NO: 22012 - RNA, 12 nt, Artificial Sequence
  source: /note="Description of Artificial Sequence: Synthetic oligonucleotide"
  source: /note="RNA"
  source: /note="5' tri-ethylene glycol (TEG)"
  modified_base (1)..(1): bicyclic nucleic acid (BNA)
  modified_base (2)..(2): bicyclic nucleic acid (BNA)
  modified_base (11)..(11): bicyclic nucleic acid (BNA)
  modified_base (12)..(12): 5-methyl bicyclic nucleic acid
  source: /note="3' tri-ethylene glycol (TEG)"
aaggaagauggc

SEQ ID NO: 22013 - RNA, 11 nt, Artificial Sequence
  source: /note="Description of Artificial Sequence: Synthetic oligonucleotide"
  source: /note="RNA"
  source: /note="5' tri-ethylene glycol (TEG)"
  modified_base (1)..(1): bicyclic nucleic acid (BNA)
  modified_base (2)..(2): bicyclic nucleic acid (BNA)
  modified_base (10)..(10): bicyclic nucleic acid (BNA)
  modified_base (11)..(11): bicyclic nucleic acid (BNA)
  source: /note="3' tri-ethylene glycol (TEG)"
aaggaagaugg

SEQ ID NO: 22014 - DNA, 10 bp, Artificial Sequence
  source: /note="Description of Artificial Sequence: Synthetic oligonucleotide"
  source: /note="DNA/RNA"
  source: /note="5' tri-ethylene glycol (TEG)"
  modified_base (1)..(1): bicyclic nucleic acid (BNA)
  modified_base (2)..(2): bicyclic nucleic acid (BNA)
  modified_base (9)..(9): bicyclic nucleic acid (BNA)
  modified_base (10)..(10): bicyclic nucleic acid (BNA)
  source: /note="3' tri-ethylene glycol (TEG)"
aaggaagatg

SEQ ID NO: 22015 - DNA, 9 bp, Artificial Sequence
  source: /note="Description of Artificial Sequence: Synthetic oligonucleotide"
  source: /note="DNA/RNA"
  source: /note="5' tri-ethylene glycol (TEG)"
  modified_base (1)..(1): bicyclic nucleic acid (BNA)
  modified_base (2)..(2): bicyclic nucleic acid (BNA)
  modified_base (8)..(8): bicyclic nucleic acid (BNA)
  modified_base (9)..(9): bicyclic nucleic acid (BNA)
  source: /note="3' tri-ethylene glycol (TEG)"
aaggaagat

SEQ ID NO: 22016 - RNA, 8 nt, Artificial Sequence
  source: /note="Description of Artificial Sequence: Synthetic oligonucleotide"
  source: /note="RNA/Antisense Oligonucleotide"
  source: /note="5' tri-ethylene glycol (TEG)"
  modified_base (1)..(1): bicyclic nucleic acid (BNA)
  modified_base (2)..(2): bicyclic nucleic acid (BNA)
  modified_base (7)..(7): bicyclic nucleic acid (BNA)
  modified_base (8)..(8): bicyclic nucleic acid (BNA)
  source: /note="3' tri-ethylene glycol (TEG)"
aaggaaga

SEQ ID NO: 22017 - RNA, 19 nt, Artificial Sequence
  source: /note="Description of Artificial Sequence: Synthetic oligonucleotide"
  source: /note="RNA"
  source: /note="5' tri-ethylene glycol (TEG)"
  modified_base (1)..(1): bicyclic nucleic acid (BNA)
  modified_base (2)..(2): bicyclic nucleic acid (BNA)
  modified_base (11)..(11): 5-methyl modified nucleotide
  modified_base (16)..(16): 5-methyl modified nucleotide
  modified_base (18)..(18): bicyclic nucleic acid (BNA)
  modified_base (19)..(19): bicyclic nucleic acid (BNA)
  source: /note="3' tri-ethylene glycol (TEG)"
aggaagauggcauuucuag

SEQ ID NO: 22018 - DNA, 18 bp, Artificial Sequence
  source: /note="Description of Artificial Sequence: Synthetic oligonucleotide"
  source: /note="Description of Combined DNA/RNA Molecule: Synthetic oligonucleotide"
  source: /note="DNA/RNA"
  source: /note="5' tri-ethylene glycol (TEG)"
  modified_base (1)..(1): bicyclic nucleic acid (BNA)
  modified_base (2)..(2): bicyclic nucleic acid (BNA)
  modified_base (11)..(11): 5-methyl modified nucleotide
  modified_base (16)..(16): 5-methyl modified nucleotide
  modified_base (17)..(17): bicyclic nucleic acid (BNA)
  modified_base (18)..(18): bicyclic nucleic acid (BNA)
  source: /note="3' tri-ethylene glycol (TEG)"
aggaagauggcauuucta

SEQ ID NO: 22019 - DNA, 17 bp, Artificial Sequence
  source: /note="Description of Artificial Sequence: Synthetic oligonucleotide"
  source: /note="Description of Combined DNA/RNA Molecule: Synthetic oligonucleotide"
  source: /note="DNA/RNA"
  source: /note="5' tri-ethylene glycol (TEG)"
  modified_base (1)..(1): bicyclic nucleic acid (BNA)
  modified_base (2)..(2): bicyclic nucleic acid (BNA)
  modified_base (11)..(11): 5-methyl modified nucleotide
  modified_base (16)..(16): 5-methyl bicyclic nucleic acid
  modified_base (17)..(17): bicyclic nucleic acid (BNA)
  source: /note="3' tri-ethylene glycol (TEG)"
aggaagauggcauuuct

SEQ ID NO: 22020 - DNA, 16 bp, Artificial Sequence
  source: /note="Description of Artificial Sequence: Synthetic oligonucleotide"
  source: /note="Description of Combined DNA/RNA Molecule: Synthetic oligonucleotide"
  source: /note="DNA/RNA"
  source: /note="5' tri-ethylene glycol (TEG)"
  modified_base (1)..(1): bicyclic nucleic acid (BNA)
  modified_base (2)..(2): bicyclic nucleic acid (BNA)
  modified_base (11)..(11): 5-methyl modified nucleotide
  modified_base (15)..(15): bicyclic nucleic acid (BNA)
  modified_base (16)..(16): 5-methyl bicyclic nucleic acid
  source: /note="3' tri-ethylene glycol (TEG)"
aggaagauggcauutc

SEQ ID NO: 22021 - DNA, 15 bp, Artificial Sequence
  source: /note="Description of Artificial Sequence: Synthetic oligonucleotide"
  source: /note="Description of Combined DNA/RNA Molecule: Synthetic oligonucleotide"
  source: /note="DNA/RNA"
  source: /note="5' tri-ethylene glycol (TEG)"
  modified_base (1)..(1): bicyclic nucleic acid (BNA)
  modified_base (2)..(2): bicyclic nucleic acid (BNA)
  modified_base (11)..(11): 5-methyl modified nucleotide
  modified_base (14)..(14): bicyclic nucleic acid (BNA)
  modified_base (15)..(15): bicyclic nucleic acid (BNA)
  source: /note="3' tri-ethylene glycol (TEG)"
aggaagauggcautt

SEQ ID NO: 22022 - DNA, 14 bp, Artificial Sequence
  source: /note="Description of Artificial Sequence: Synthetic oligonucleotide"
  source: /note="Description of Combined DNA/RNA Molecule: Synthetic oligonucleotide"
  source: /note="DNA/RNA"
  source: /note="5' tri-ethylene glycol (TEG)"
  modified_base (1)..(1): bicyclic nucleic acid (BNA)
  modified_base (2)..(2): bicyclic nucleic acid (BNA)
  modified_base (11)..(11): 5-methyl modified nucleotide
  modified_base (13)..(13): bicyclic nucleic acid (BNA)
  modified_base (14)..(14): bicyclic nucleic acid (BNA)
  source: /note="3' tri-ethylene glycol (TEG)"
aggaagauggcatt

SEQ ID NO: 22023 - DNA, 13 bp, Artificial Sequence
  source: /note="Description of Artificial Sequence: Synthetic oligonucleotide"
  source: /note="Description of Combined DNA/RNA Molecule: Synthetic oligonucleotide"
  source: /note="DNA/RNA"
  source: /note="5' tri-ethylene glycol (TEG)"
  modified_base (1)..(1): bicyclic nucleic acid (BNA)
  modified_base (2)..(2): bicyclic nucleic acid (BNA)
  modified_base (11)..(11): 5-methyl modified nucleotide
  modified_base (12)..(12): bicyclic nucleic acid (BNA)
  modified_base (13)..(13): bicyclic nucleic acid (BNA)
  source: /note="3' tri-ethylene glycol (TEG)"
aggaagauggcat

SEQ ID NO: 22024 - RNA, 12 nt, Artificial Sequence
  source: /note="Description of Artificial Sequence: Synthetic oligonucleotide"
  source: /note="RNA"
  source: /note="5' tri-ethylene glycol (TEG)"
  modified_base (1)..(1): bicyclic nucleic acid (BNA)
  modified_base (2)..(2): bicyclic nucleic acid (BNA)
  modified_base (11)..(11): 5-methyl bicyclic nucleic acid
  modified_base (12)..(12): bicyclic nucleic acid (BNA)
  source: /note="3' tri-ethylene glycol (TEG)"
aggaagauggca

SEQ ID NO: 22025 - RNA, 10 nt, Artificial Sequence
  source: /note="Description of Artificial Sequence: Synthetic oligonucleotide"
  source: /note="RNA"
  source: /note="5' tri-ethylene glycol (TEG)"
  modified_base (1)..(1): bicyclic nucleic acid (BNA)
  modified_base (2)..(2): bicyclic nucleic acid (BNA)
  modified_base (9)..(9): bicyclic nucleic acid (BNA)
  modified_base (10)..(10): bicyclic nucleic acid (BNA)
  source: /note="3' tri-ethylene glycol (TEG)"
aggaagaugg

SEQ ID NO: 22026 - DNA, 9 bp, Artificial Sequence
  source: /note="Description of Artificial Sequence: Synthetic oligonucleotide"
  source: /note="DNA/RNA"
  source: /note="5' tri-ethylene glycol (TEG)"
  modified_base (1)..(1): bicyclic nucleic acid (BNA)
  modified_base (2)..(2): bicyclic nucleic acid (BNA)
  modified_base (8)..(8): bicyclic nucleic acid (BNA)
  modified_base (9)..(9): bicyclic nucleic acid (BNA)
  source: /note="3' tri-ethylene glycol (TEG)"
aggaagatg

SEQ ID NO: 22027 - DNA, 8 bp, Artificial Sequence
  source: /note="Description of Artificial Sequence: Synthetic oligonucleotide"
  source: /note="DNA/RNA"
  source: /note="5' tri-ethylene glycol (TEG)"
  modified_base (1)..(1): bicyclic nucleic acid (BNA)
  modified_base (2)..(2): bicyclic nucleic acid (BNA)
  modified_base (7)..(7): bicyclic nucleic acid (BNA)
  modified_base (8)..(8): bicyclic nucleic acid (BNA)
  source: /note="3' tri-ethylene glycol (TEG)"
aggaagat

SEQ ID NO: 22028 - RNA, 18 nt, Artificial Sequence
  source: /note="Description of Artificial Sequence: Synthetic oligonucleotide"
  source: /note="RNA"
  source: /note="5' tri-ethylene glycol (TEG)"
  modified_base (1)..(1): bicyclic nucleic acid (BNA)
  modified_base (2)..(2): bicyclic nucleic acid (BNA)
  modified_base (10)..(10): 5-methyl modified nucleotide
  modified_base (15)..(15): 5-methyl modified nucleotide
  modified_base (17)..(17): bicyclic nucleic acid (BNA)
  modified_base (18)..(18): bicyclic nucleic acid (BNA)
  source: /note="3' tri-ethylene glycol (TEG)"
ggaagauggcauuucuag

SEQ ID NO: 22029 - DNA, 17 bp, Artificial Sequence
  source: /note="Description of Artificial Sequence: Synthetic oligonucleotide"
  source: /note="Description of Combined DNA/RNA Molecule: Synthetic oligonucleotide"
  source: /note="DNA/RNA"
  source: /note="5' tri-ethylene glycol (TEG)"
  modified_base (1)..(1): bicyclic nucleic acid (BNA)
  modified_base (2)..(2): bicyclic nucleic acid (BNA)
  modified_base (10)..(10): 5-methyl modified nucleotide
  modified_base (15)..(15): 5-methyl modified nucleotide
  modified_base (16)..(16): bicyclic nucleic acid (BNA)
  modified_base (17)..(17): bicyclic nucleic acid (BNA)
  source: /note="3' tri-ethylene glycol (TEG)"
ggaagauggcauuucta

SEQ ID NO: 22030 - DNA, 16 bp, Artificial Sequence
  source: /note="Description of Artificial Sequence: Synthetic oligonucleotide"
  source: /note="Description of Combined DNA/RNA Molecule: Synthetic oligonucleotide"
  source: /note="DNA/RNA"
  source: /note="5' tri-ethylene glycol (TEG)"
  modified_base (1)..(1): bicyclic nucleic acid (BNA)
  modified_base (2)..(2): bicyclic nucleic acid (BNA)
  modified_base (10)..(10): 5-methyl modified nucleotide
  modified_base (15)..(15): 5-methyl bicyclic nucleic acid
  modified_base (16)..(16): bicyclic nucleic acid (BNA)
  source: /note="3' tri-ethylene glycol (TEG)"
ggaagauggcauuuct

SEQ ID NO: 22031 - DNA, 15 bp, Artificial Sequence
  source: /note="Description of Artificial Sequence: Synthetic oligonucleotide"
  source: /note="Description of Combined DNA/RNA Molecule: Synthetic oligonucleotide"
  source: /note="DNA/RNA"
  source: /note="5' tri-ethylene glycol (TEG)"
  modified_base (1)..(1): bicyclic nucleic acid (BNA)
  modified_base (2)..(2): bicyclic nucleic acid (BNA)
  modified_base (10)..(10): 5-methyl modified nucleotide
  modified_base (14)..(14): bicyclic nucleic acid (BNA)
  modified_base (15)..(15): 5-methyl bicyclic nucleic acid
  source: /note="3' tri-ethylene glycol (TEG)"
ggaagauggcauutc

SEQ ID NO: 22032 - DNA, 14 bp, Artificial Sequence
  source: /note="Description of Artificial Sequence: Synthetic oligonucleotide"
  source: /note="Description of Combined DNA/RNA Molecule: Synthetic oligonucleotide"
  source: /note="DNA/RNA"
  source: /note="5' tri-ethylene glycol (TEG)"
  modified_base (1)..(1): bicyclic nucleic acid (BNA)
  modified_base (2)..(2): bicyclic nucleic acid (BNA)
  modified_base (10)..(10): 5-methyl modified nucleotide
  modified_base (13)..(13): bicyclic nucleic acid (BNA)
  modified_base (14)..(14): bicyclic nucleic acid (BNA)
  source: /note="3' tri-ethylene glycol (TEG)"
ggaagauggcautt

SEQ ID NO: 22033 - DNA, 13 bp, Artificial Sequence
  source: /note="Description of Artificial Sequence: Synthetic oligonucleotide"
  source: /note="Description of Combined DNA/RNA Molecule: Synthetic oligonucleotide"
  source: /note="DNA/RNA"
  source: /note="5' tri-ethylene glycol (TEG)"
  modified_base (1)..(1): bicyclic nucleic acid (BNA)
  modified_base (2)..(2): bicyclic nucleic acid (BNA)
  modified_base (10)..(10): 5-methyl modified nucleotide
  modified_base (12)..(12): bicyclic nucleic acid (BNA)
  modified_base (13)..(13): bicyclic nucleic acid (BNA)
  source: /note="3' tri-ethylene glycol (TEG)"
ggaagauggcatt

SEQ ID NO: 22034 - DNA, 12 bp, Artificial Sequence
  source: /note="Description of Artificial Sequence: Synthetic oligonucleotide"
  source: /note="Description of Combined DNA/RNA Molecule: Synthetic oligonucleotide"
  source: /note="DNA/RNA"
  source: /note="5' tri-ethylene glycol (TEG)"
  modified_base (1)..(1): bicyclic nucleic acid (BNA)
  modified_base (2)..(2): bicyclic nucleic acid (BNA)
  modified_base (10)..(10): 5-methyl modified nucleotide
  modified_base (11)..(11): bicyclic nucleic acid (BNA)
  modified_base (12)..(12): bicyclic nucleic acid (BNA)
  source: /note="3' tri-ethylene glycol (TEG)"
ggaagauggcat

SEQ ID NO: 22035 - RNA, 11 nt, Artificial Sequence
  source: /note="Description of Artificial Sequence: Synthetic oligonucleotide"
  source: /note="RNA"
  source: /note="5' tri-ethylene glycol (TEG)"
  modified_base (1)..(1): bicyclic nucleic acid (BNA)
  modified_base (2)..(2): bicyclic nucleic acid (BNA)
  modified_base (10)..(10): 5-methyl bicyclic nucleic acid
  modified_base (11)..(11): bicyclic nucleic acid (BNA)
  source: /note="3' tri-ethylene glycol (TEG)"
ggaagauggca

SEQ ID NO: 22036 - RNA, 10 nt, Artificial Sequence
  source: /note="Description of Artificial Sequence: Synthetic oligonucleotide"
  source: /note="RNA"
  source: /note="5' tri-ethylene glycol (TEG)"
  modified_base (1)..(1): bicyclic nucleic acid (BNA)
  modified_base (2)..(2): bicyclic nucleic acid (BNA)
  modified_base (9)..(9): bicyclic nucleic acid (BNA)
  modified_base (10)..(10): 5-methyl bicyclic nucleic acid
  source: /note="3' tri-ethylene glycol (TEG)"
ggaagauggc

SEQ ID NO: 22037 - DNA, 8 bp, Artificial Sequence
  source: /note="Description of Artificial Sequence: Synthetic oligonucleotide"
  source: /note="DNA/RNA"
  source: /note="5' tri-ethylene glycol (TEG)"
  modified_base (1)..(1): bicyclic nucleic acid (BNA)
  modified_base (2)..(2): bicyclic nucleic acid (BNA)
  modified_base (7)..(7): bicyclic nucleic acid (BNA)
  modified_base (8)..(8): bicyclic nucleic acid (BNA)
  source: /note="3' tri-ethylene glycol (TEG)"
ggaagatg

SEQ ID NO: 22038 - RNA, 17 nt, Artificial Sequence
  source: /note="Description of Artificial Sequence: Synthetic oligonucleotide"
  source: /note="RNA"
  source: /note="5' tri-ethylene glycol (TEG)"
  modified_base (1)..(1): bicyclic nucleic acid (BNA)
  modified_base (2)..(2): bicyclic nucleic acid (BNA)
  modified_base (9)..(9): 5-methyl modified nucleotide
  modified_base (14)..(14): 5-methyl modified nucleotide
  modified_base (16)..(16): bicyclic nucleic acid (BNA)
  modified_base (17)..(17): bicyclic nucleic acid (BNA)
  source: /note="3' tri-ethylene glycol (TEG)"
gaagauggcauuucuag

SEQ ID NO: 22039 - DNA, 16 bp, Artificial Sequence
  source: /note="Description of Artificial Sequence: Synthetic oligonucleotide"
  source: /note="Description of Combined DNA/RNA Molecule: Synthetic oligonucleotide"
  source: /note="DNA/RNA"
  source: /note="5' tri-ethylene glycol (TEG)"
  modified_base (1)..(1): bicyclic nucleic acid (BNA)
  modified_base (2)..(2): bicyclic nucleic acid (BNA)
  modified_base (9)..(9): 5-methyl modified nucleotide
  modified_base (14)..(14): 5-methyl modified nucleotide
  modified_base (15)..(15): bicyclic nucleic acid (BNA)
  modified_base (16)..(16): bicyclic nucleic acid (BNA)
  source: /note="3' tri-ethylene glycol (TEG)"
gaagauggcauuucta

SEQ ID NO: 22040 - DNA, 14 bp, Artificial Sequence
  source: /note="Description of Artificial Sequence: Synthetic oligonucleotide"
  source: /note="Description of Combined DNA/RNA Molecule: Synthetic oligonucleotide"
  source: /note="DNA/RNA"
  source: /note="5' tri-ethylene glycol (TEG)"
  modified_base (1)..(1): bicyclic nucleic acid (BNA)
  modified_base (2)..(2): bicyclic nucleic acid (BNA)
  modified_base (9)..(9): 5-methyl modified nucleotide
  modified_base (13)..(13): bicyclic nucleic acid (BNA)
  modified_base (14)..(14): 5-methyl bicyclic nucleic acid
  source: /note="3' tri-ethylene glycol (TEG)"
gaagauggcauutc

SEQ ID NO: 22041 - DNA, 13 bp, Artificial Sequence
  source: /note="Description of Artificial Sequence: Synthetic oligonucleotide"
  source: /note="Description of Combined DNA/RNA Molecule: Synthetic oligonucleotide"
  source: /note="DNA/RNA"
  source: /note="5' tri-ethylene glycol (TEG)"
  modified_base (1)..(1): bicyclic nucleic acid (BNA)
  modified_base (2)..(2): bicyclic nucleic acid (BNA)
  modified_base (9)..(9): 5-methyl modified nucleotide
  modified_base (12)..(12): bicyclic nucleic acid (BNA)
  modified_base (13)..(13): bicyclic nucleic acid (BNA)
  source: /note="3' tri-ethylene glycol (TEG)"
gaagauggcautt

SEQ ID NO: 22042 - DNA, 12 bp, Artificial Sequence
  source: /note="Description of Artificial Sequence: Synthetic oligonucleotide"
  source: /note="Description of Combined DNA/RNA Molecule: Synthetic oligonucleotide"
  source: /note="DNA/RNA"
  source: /note="5' tri-ethylene glycol (TEG)"
  modified_base (1)..(1): bicyclic nucleic acid (BNA)
  modified_base (2)..(2): bicyclic nucleic acid (BNA)
  modified_base (9)..(9): 5-methyl modified nucleotide
  modified_base (11)..(11): bicyclic nucleic acid (BNA)
  modified_base (12)..(12): bicyclic nucleic acid (BNA)
  source: /note="3' tri-ethylene glycol (TEG)"
gaagauggcatt

SEQ ID NO: 22043 - DNA, 11 bp, Artificial Sequence
  source: /note="Description of Artificial Sequence: Synthetic oligonucleotide"
  source: /note="Description of Combined DNA/RNA Molecule: Synthetic oligonucleotide"
  source: /note="DNA/RNA"
  source: /note="5' tri-ethylene glycol (TEG)"
  modified_base (1)..(1): bicyclic nucleic acid (BNA)
  modified_base (2)..(2): bicyclic nucleic acid (BNA)
  modified_base (9)..(9): 5-methyl modified nucleotide
  modified_base (10)..(10): bicyclic nucleic acid (BNA)
  modified_base (11)..(11): bicyclic nucleic acid (BNA)
  source: /note="3' tri-ethylene glycol (TEG)"
gaagauggcat

SEQ ID NO: 22044 - RNA, 10 nt, Artificial Sequence
  source: /note="Description of Artificial Sequence: Synthetic oligonucleotide"
  source: /note="RNA"
  source: /note="5' tri-ethylene glycol (TEG)"
  modified_base (1)..(1): bicyclic nucleic acid (BNA)
  modified_base (2)..(2): bicyclic nucleic acid (BNA)
  modified_base (9)..(9): 5-methyl bicyclic nucleic acid
  modified_base (10)..(10): bicyclic nucleic acid (BNA)
  source: /note="3' tri-ethylene glycol (TEG)"
gaagauggca

SEQ ID NO: 22045 - RNA, 9 nt, Artificial Sequence
  source: /note="Description of Artificial Sequence: Synthetic oligonucleotide"
  source: /note="RNA"
  source: /note="5' tri-ethylene glycol (TEG)"
  modified_base (1)..(1): bicyclic nucleic acid (BNA)
  modified_base (2)..(2): bicyclic nucleic acid (BNA)
  modified_base (8)..(8): bicyclic nucleic acid (BNA)
  modified_base (9)..(9): 5-methyl bicyclic nucleic acid
  source: /note="3' tri-ethylene glycol (TEG)"
gaagauggc

SEQ ID NO: 22046 - RNA, 8 nt, Artificial Sequence
  source: /note="Description of Artificial Sequence: Synthetic oligonucleotide"
  source: /note="RNA"
  source: /note="5' tri-ethylene glycol (TEG)"
  modified_base (1)..(1): bicyclic nucleic acid (BNA)
  modified_base (2)..(2): bicyclic nucleic acid (BNA)
  modified_base (7)..(7): bicyclic nucleic acid (BNA)
  modified_base (8)..(8): bicyclic nucleic acid (BNA)
  source: /note="3' tri-ethylene glycol (TEG)"
gaagaugg

SEQ ID NO: 22047 - RNA, 16 nt, Artificial Sequence
  source: /note="Description of Artificial Sequence: Synthetic oligonucleotide"
  source: /note="RNA"
  source: /note="5' tri-ethylene glycol (TEG)"
  modified_base (1)..(1): bicyclic nucleic acid (BNA)
  modified_base (2)..(2): bicyclic nucleic acid (BNA)
  modified_base (8)..(8): 5-methyl modified nucleotide
  modified_base (13)..(13): 5-methyl modified nucleotide
  modified_base (15)..(15): bicyclic nucleic acid (BNA)
  modified_base (16)..(16): bicyclic nucleic acid (BNA)
  source: /note="3' tri-ethylene glycol (TEG)"
aagauggcauuucuag

SEQ ID NO: 22048 - DNA, 15 bp, Artificial Sequence
  source: /note="Description of Artificial Sequence: Synthetic oligonucleotide"
  source: /note="Description of Combined DNA/RNA Molecule: Synthetic oligonucleotide"
  source: /note="DNA/RNA"
  source: /note="5' tri-ethylene glycol (TEG)"
  modified_base (1)..(1): bicyclic nucleic acid (BNA)
  modified_base (2)..(2): bicyclic nucleic acid (BNA)
  modified_base (8)..(8): 5-methyl modified nucleotide
  modified_base (13)..(13): 5-methyl modified nucleotide
  modified_base (14)..(14): bicyclic nucleic acid (BNA)
  modified_base (15)..(15): bicyclic nucleic acid (BNA)
  source: /note="3' tri-ethylene glycol (TEG)"
aagauggcauuucta

SEQ ID NO: 22049 - DNA, 14 bp, Artificial Sequence
  source: /note="Description of Artificial Sequence: Synthetic oligonucleotide"
  source: /note="Description of Combined DNA/RNA Molecule: Synthetic oligonucleotide"
  source: /note="DNA/RNA"
  source: /note="5' tri-ethylene glycol (TEG)"
  modified_base (1)..(1): bicyclic nucleic acid (BNA)
  modified_base (2)..(2): bicyclic nucleic acid (BNA)
  modified_base (8)..(8): 5-methyl modified nucleotide
  modified_base (13)..(13): 5-methyl bicyclic nucleic acid
  modified_base (14)..(14): bicyclic nucleic acid (BNA)
  source: /note="3' tri-ethylene glycol (TEG)"
aagauggcauuuct

SEQ ID NO: 22050 - DNA, 13 bp, Artificial Sequence
  source: /note="Description of Artificial Sequence: Synthetic oligonucleotide"
  source: /note="Description of Combined DNA/RNA Molecule: Synthetic oligonucleotide"
  source: /note="DNA/RNA"
  source: /note="5' tri-ethylene glycol (TEG)"
  modified_base (1)..(1): bicyclic nucleic acid (BNA)
  modified_base (2)..(2): bicyclic nucleic acid (BNA)
  modified_base (8)..(8): 5-methyl modified nucleotide
  modified_base (12)..(12): bicyclic nucleic acid (BNA)
  modified_base (13)..(13): 5-methyl bicyclic nucleic acid
  source: /note="3' tri-ethylene glycol (TEG)"
aagauggcauutc

SEQ ID NO: 22051 - DNA, 12 bp, Artificial Sequence
  source: /note="Description of Artificial Sequence: Synthetic oligonucleotide"
  source: /note="Description of Combined DNA/RNA Molecule: Synthetic oligonucleotide"
  source: /note="DNA/RNA"
  source: /note="5' tri-ethylene glycol (TEG)"
  modified_base (1)..(1): bicyclic nucleic acid (BNA)
  modified_base (2)..(2): bicyclic nucleic acid (BNA)
  modified_base (8)..(8): 5-methyl modified nucleotide
  modified_base (11)..(11): bicyclic nucleic acid (BNA)
  modified_base (12)..(12): bicyclic nucleic acid (BNA)
  source: /note="3' tri-ethylene glycol (TEG)"
aagauggcautt

SEQ ID NO: 22052 - DNA, 11 bp, Artificial Sequence
  source: /note="Description of Artificial Sequence: Synthetic oligonucleotide"
  source: /note="Description of Combined DNA/RNA Molecule: Synthetic oligonucleotide"
  source: /note="DNA/RNA"
  source: /note="5' tri-ethylene glycol (TEG)"
  modified_base (1)..(1): bicyclic nucleic acid (BNA)
  modified_base (2)..(2): bicyclic nucleic acid (BNA)
  modified_base (8)..(8): 5-methyl modified nucleotide
  modified_base (10)..(10): bicyclic nucleic acid (BNA)
  modified_base (11)..(11): bicyclic nucleic acid (BNA)
  source: /note="3' tri-ethylene glycol (TEG)"
aagauggcatt

SEQ ID NO: 22053 - DNA, 10 bp, Artificial Sequence
  source: /note="Description of Artificial Sequence: Synthetic oligonucleotide"
  source: /note="Description of Combined DNA/RNA Molecule: Synthetic oligonucleotide"
  source: /note="DNA/RNA"
  source: /note="5' tri-ethylene glycol (TEG)"
  modified_base (1)..(1): bicyclic nucleic acid (BNA)
  modified_base (2)..(2): bicyclic nucleic acid (BNA)
  modified_base (8)..(8): 5-methyl modified nucleotide
  modified_base (9)..(9): bicyclic nucleic acid (BNA)
  modified_base (10)..(10): bicyclic nucleic acid (BNA)
  source: /note="3' tri-ethylene glycol (TEG)"
aagauggcat

SEQ ID NO: 22054 - RNA, 9 nt, Artificial Sequence
  source: /note="Description of Artificial Sequence: Synthetic oligonucleotide"
  source: /note="RNA"
  source: /note="5' tri-ethylene glycol (TEG)"
  modified_base (1)..(1): bicyclic nucleic acid (BNA)
  modified_base (2)..(2): bicyclic nucleic acid (BNA)
  modified_base (8)..(8): 5-methyl bicyclic nucleic acid
  modified_base (9)..(9): bicyclic nucleic acid (BNA)
  source: /note="3' tri-ethylene glycol (TEG)"
aagauggca

SEQ ID NO: 22055 - RNA, 8 nt, Artificial Sequence
  source: /note="Description of Artificial Sequence: Synthetic oligonucleotide"
  source: /note="RNA"
  source: /note="5' tri-ethylene glycol (TEG)"
  modified_base (1)..(1): bicyclic nucleic acid (BNA)
  modified_base (2)..(2): bicyclic nucleic acid (BNA)
  modified_base (7)..(7): bicyclic nucleic acid (BNA)
  modified_base (8)..(8): 5-methyl bicyclic nucleic acid
  source: /note="3' tri-ethylene glycol (TEG)"
aagauggc

SEQ ID NO: 22056 - RNA, 15 nt, Artificial Sequence
  source: /note="Description of Artificial Sequence: Synthetic oligonucleotide"
  source: /note="RNA"
  source: /note="5' tri-ethylene glycol (TEG)"
  modified_base (1)..(1): bicyclic nucleic acid (BNA)
  modified_base (2)..(2): bicyclic nucleic acid (BNA)
  modified_base (7)..(7): 5-methyl modified nucleotide
  modified_base (12)..(12): 5-methyl modified nucleotide
  modified_base (14)..(14): bicyclic nucleic acid (BNA)
  modified_base (15)..(15): bicyclic nucleic acid (BNA)
  source: /note="3' tri-ethylene glycol (TEG)"
agauggcauuucuag

SEQ ID NO: 22057 - DNA, 14 bp, Artificial Sequence
  source: /note="Description of Artificial Sequence: Synthetic oligonucleotide"
  source: /note="Description of Combined DNA/RNA Molecule: Synthetic oligonucleotide"
  source: /note="DNA/RNA"
  source: /note="5' tri-ethylene glycol (TEG)"
  modified_base (1)..(1): bicyclic nucleic acid (BNA)
  modified_base (2)..(2): bicyclic nucleic acid (BNA)
  modified_base (7)..(7): 5-methyl modified nucleotide
  modified_base (12)..(12): 5-methyl modified nucleotide
  modified_base (13)..(13): bicyclic nucleic acid (BNA)
  modified_base (14)..(14): bicyclic nucleic acid (BNA)
  source: /note="3' tri-ethylene glycol (TEG)"
agauggcauuucta

SEQ ID NO: 22058 - DNA, 13 bp, Artificial Sequence
  source: /note="Description of Artificial Sequence: Synthetic oligonucleotide"
  source: /note="Description of Combined DNA/RNA Molecule: Synthetic oligonucleotide"
  source: /note="DNA/RNA"
  source: /note="5' tri-ethylene glycol (TEG)"
  modified_base (1)..(1): bicyclic nucleic acid (BNA)
  modified_base (2)..(2): bicyclic nucleic acid (BNA)
  modified_base (7)..(7): 5-methyl modified nucleotide
  modified_base (12)..(12): 5-methyl bicyclic nucleic acid
  modified_base (13)..(13): bicyclic nucleic acid (BNA)
  source: /note="3' tri-ethylene glycol (TEG)"
agauggcauuuct

SEQ ID NO: 22059 - DNA, 12 bp, Artificial Sequence
  source: /note="Description of Artificial Sequence: Synthetic oligonucleotide"
  source: /note="Description of Combined DNA/RNA Molecule: Synthetic oligonucleotide"
  source: /note="DNA/RNA"
  source: /note="5' tri-ethylene glycol (TEG)"
  modified_base (1)..(1): bicyclic nucleic acid (BNA)
  modified_base (2)..(2): bicyclic nucleic acid (BNA)
  modified_base (7)..(7): 5-methyl modified nucleotide
  modified_base (11)..(11): bicyclic nucleic acid (BNA)
  modified_base (12)..(12): 5-methyl bicyclic nucleic acid
  source: /note="3' tri-ethylene glycol (TEG)"
agauggcauutc

SEQ ID NO: 22060 - DNA, 11 bp, Artificial Sequence
  source: /note="Description of Artificial Sequence: Synthetic oligonucleotide"
  source: /note="Description of Combined DNA/RNA Molecule: Synthetic oligonucleotide"
  source: /note="DNA/RNA"
  source: /note="5' tri-ethylene glycol (TEG)"
  modified_base (1)..(1): bicyclic nucleic acid (BNA)
  modified_base (2)..(2): bicyclic nucleic acid (BNA)
  modified_base (7)..(7): 5-methyl modified nucleotide
  modified_base (10)..(10): bicyclic nucleic acid (BNA)
  modified_base (11)..(11): bicyclic nucleic acid (BNA)
  source: /note="3' tri-ethylene glycol (TEG)"
agauggcautt

SEQ ID NO: 22061 - DNA, 10 bp, Artificial Sequence
  source: /note="Description of Artificial Sequence: Synthetic oligonucleotide"
  source: /note="Description of Combined DNA/RNA Molecule: Synthetic oligonucleotide"
  source: /note="DNA/RNA"
  source: /note="5' tri-ethylene glycol (TEG)"
  modified_base (1)..(1): bicyclic nucleic acid (BNA)
  modified_base (2)..(2): bicyclic nucleic acid (BNA)
  modified_base (7)..(7): 5-methyl modified nucleotide
  modified_base (9)..(9): bicyclic nucleic acid (BNA)
  modified_base (10)..(10): bicyclic nucleic acid (BNA)
  source: /note="3' tri-ethylene glycol (TEG)"
agauggcatt

SEQ ID NO: 22062 - DNA, 9 bp, Artificial Sequence
  source: /note="Description of Artificial Sequence: Synthetic oligonucleotide"
  source: /note="Description of Combined DNA/RNA Molecule: Synthetic oligonucleotide"
  source: /note="DNA/RNA"
  source: /note="5' tri-ethylene glycol (TEG)"
  modified_base (1)..(1): bicyclic nucleic acid (BNA)
  modified_base (2)..(2): bicyclic nucleic acid (BNA)
  modified_base (7)..(7): 5-methyl modified nucleotide
  modified_base (8)..(8): bicyclic nucleic acid (BNA)
  modified_base (9)..(9): bicyclic nucleic acid (BNA)
  source: /note="3' tri-ethylene glycol (TEG)"
agauggcat

SEQ ID NO: 22063 - RNA, 8 nt, Artificial Sequence
  source: /note="Description of Artificial Sequence: Synthetic oligonucleotide"
  source: /note="RNA"
  source: /note="5' tri-ethylene glycol (TEG)"
  modified_base (1)..(1): bicyclic nucleic acid (BNA)
  modified_base (2)..(2): bicyclic nucleic acid (BNA)
  modified_base (7)..(7): 5-methyl bicyclic nucleic acid
  modified_base (8)..(8): bicyclic nucleic acid (BNA)
  source: /note="3' tri-ethylene glycol (TEG)"
agauggca

SEQ ID NO: 22064 - DNA, 30 bp, Artificial Sequence; identical to SEQ ID NO: 8204
  source: /note="Description of Artificial Sequence: Synthetic oligonucleotide"
  source: /note="Description of Combined DNA/RNA Molecule: Synthetic oligonucleotide"
  source: /note="DNA/RNA"
  source: /note="5' tri-ethylene glycol (TEG)"
  modified_base (1)..(1): 5-methyl bicyclic nucleic acid
  modified_base (2)..(2): bicyclic nucleic acid (BNA)
  modified_base (3)..(3): 5-methyl modified nucleotide
  modified_base (4)..(4): 5-methyl modified nucleotide
  modified_base (7)..(7): 5-methyl modified nucleotide
  modified_base (10)..(10): 5-methyl modified nucleotide
  modified_base (22)..(22): 5-methyl modified nucleotide
  modified_base (27)..(27): 5-methyl modified nucleotide
  modified_base (29)..(29): bicyclic nucleic acid (BNA)
  modified_base (30)..(30): bicyclic nucleic acid (BNA)
  source: /note="3' tri-ethylene glycol (TEG)"

SEQ ID NO: 22065 - DNA, 29 bp, Artificial Sequence
  source: /note="Description of Artificial Sequence: Synthetic oligonucleotide"
  source: /note="Description of Combined DNA/RNA Molecule: Synthetic oligonucleotide"
  source: /note="DNA/RNA"
  source: /note="5' tri-ethylene glycol (TEG)"
  modified_base (1)..(1): 5-methyl bicyclic nucleic acid
  modified_base (2)..(2): bicyclic nucleic acid (BNA)
  modified_base (3)..(3): 5-methyl modified nucleotide
  modified_base (4)..(4): 5-methyl modified nucleotide
  modified_base (7)..(7): 5-methyl modified nucleotide
  modified_base (10)..(10): 5-methyl modified nucleotide
  modified_base (22)..(22): 5-methyl modified nucleotide
  modified_base (27)..(27): 5-methyl modified nucleotide
  modified_base (28)..(28): bicyclic nucleic acid (BNA)
  modified_base (29)..(29): bicyclic nucleic acid (BNA)
  source: /note="3' tri-ethylene glycol (TEG)"
ctccaacaucaaggaagauggcauuucta

SEQ ID NO: 22066 - DNA, 28 bp, Artificial Sequence
  source: /note="Description of Artificial Sequence: Synthetic oligonucleotide"
  source: /note="Description of Combined DNA/RNA Molecule: Synthetic oligonucleotide"
  source: /note="DNA/RNA"
  source: /note="5' tri-ethylene glycol (TEG)"
  modified_base (1)..(1): 5-methyl bicyclic nucleic acid
  modified_base (2)..(2): bicyclic nucleic acid (BNA)
  modified_base (3)..(3): 5-methyl modified nucleotide
  modified_base (4)..(4): 5-methyl modified nucleotide
  modified_base (7)..(7): 5-methyl modified nucleotide
  modified_base (10)..(10): 5-methyl modified nucleotide
  modified_base (22)..(22): 5-methyl modified nucleotide
  modified_base (27)..(27): 5-methyl bicyclic nucleic acid
  modified_base (28)..(28): bicyclic nucleic acid (BNA)
  source: /note="3' tri-ethylene glycol (TEG)"
ctccaacaucaaggaagauggcauuuct

SEQ ID NO: 22067 - DNA, 27 bp, Artificial Sequence
  source: /note="Description of Artificial Sequence: Synthetic oligonucleotide"
  source: /note="Description of Combined DNA/RNA Molecule: Synthetic oligonucleotide"
  source: /note="DNA/RNA"
  source: /note="5' tri-ethylene glycol (TEG)"
  modified_base (1)..(1): 5-methyl bicyclic nucleic acid
  modified_base (2)..(2): bicyclic nucleic acid (BNA)
  modified_base (3)..(3): 5-methyl modified nucleotide
  modified_base (4)..(4): 5-methyl modified nucleotide
  modified_base (7)..(7): 5-methyl modified nucleotide
  modified_base (10)..(10): 5-methyl modified nucleotide
  modified_base (22)..(22): 5-methyl modified nucleotide
  modified_base (26)..(26): bicyclic nucleic acid (BNA)
  modified_base (27)..(27): 5-methyl bicyclic nucleic acid
  source: /note="3' tri-ethylene glycol (TEG)"
ctccaacaucaaggaagauggcauutc

SEQ ID NO: 22068 - DNA, 26 bp, Artificial Sequence
  source: /note="Description of Artificial Sequence: Synthetic oligonucleotide"
  source: /note="Description of Combined DNA/RNA Molecule: Synthetic oligonucleotide"
  source: /note="DNA/RNA"
  source: /note="5' tri-ethylene glycol (TEG)"
  modified_base (1)..(1): 5-methyl bicyclic nucleic acid
  modified_base (2)..(2): bicyclic nucleic acid (BNA)
  modified_base (3)..(3): 5-methyl modified nucleotide
  modified_base (4)..(4): 5-methyl modified nucleotide
  modified_base (7)..(7): 5-methyl modified nucleotide
  modified_base (10)..(10): 5-methyl modified nucleotide
  modified_base (22)..(22): 5-methyl modified nucleotide
  modified_base (25)..(25): bicyclic nucleic acid (BNA)
  modified_base (26)..(26): bicyclic nucleic acid (BNA)
  source: /note="3' tri-ethylene glycol (TEG)"
ctccaacaucaaggaagauggcautt

SEQ ID NO: 22069 - DNA, 25 bp, Artificial Sequence
  source: /note="Description of Artificial Sequence: Synthetic oligonucleotide"
  source: /note="Description of Combined DNA/RNA Molecule: Synthetic oligonucleotide"
  source: /note="DNA/RNA"
  source: /note="5' tri-ethylene glycol (TEG)"
  modified_base (1)..(1): 5-methyl bicyclic nucleic acid
  modified_base (2)..(2): bicyclic nucleic acid (BNA)
  modified_base (3)..(3): 5-methyl modified nucleotide
  modified_base (4)..(4): 5-methyl modified nucleotide
  modified_base (7)..(7): 5-methyl modified nucleotide
  modified_base (10)..(10): 5-methyl modified nucleotide
  modified_base (22)..(22): 5-methyl modified nucleotide
  modified_base (24)..(24): bicyclic nucleic acid (BNA)
  modified_base (25)..(25): bicyclic nucleic acid (BNA)
  source: /note="3' tri-ethylene glycol (TEG)"
ctccaacaucaaggaagauggcatt

SEQ ID NO: 22070 - DNA, 24 bp, Artificial Sequence
  source: /note="Description of Artificial Sequence: Synthetic oligonucleotide"
  source: /note="Description of Combined DNA/RNA Molecule: Synthetic oligonucleotide"
  source: /note="DNA/RNA"
  source: /note="5' tri-ethylene glycol (TEG)"
  modified_base (1)..(1): 5-methyl bicyclic nucleic acid
  modified_base (2)..(2): bicyclic nucleic acid (BNA)
  modified_base (3)..(3): 5-methyl modified nucleotide
  modified_base (4)..(4): 5-methyl modified nucleotide
  modified_base (7)..(7): 5-methyl modified nucleotide
  modified_base (10)..(10): 5-methyl modified nucleotide
  modified_base (22)..(22): 5-methyl modified nucleotide
  modified_base (23)..(23): bicyclic nucleic acid (BNA)
  modified_base (24)..(24): bicyclic nucleic acid (BNA)
  source: /note="3' tri-ethylene glycol (TEG)"
ctccaacaucaaggaagauggcat

SEQ ID NO: 22071 - DNA, 23 bp, Artificial Sequence
  source: /note="Description of Artificial Sequence: Synthetic oligonucleotide"
  source: /note="Description of Combined DNA/RNA Molecule: Synthetic oligonucleotide"
  source: /note="DNA/RNA"
  source: /note="5' tri-ethylene glycol (TEG)"
  modified_base (1)..(1): 5-methyl bicyclic nucleic acid
  modified_base (2)..(2): bicyclic nucleic acid (BNA)
  modified_base (3)..(3): 5-methyl modified nucleotide
  modified_base (4)..(4): 5-methyl modified nucleotide
  modified_base (7)..(7): 5-methyl modified nucleotide
  modified_base (10)..(10): 5-methyl modified nucleotide
  modified_base (22)..(22): 5-methyl bicyclic nucleic acid
  modified_base (23)..(23): bicyclic nucleic acid (BNA)
  source: /note="3' tri-ethylene glycol (TEG)"
ctccaacaucaaggaagauggca

SEQ ID NO: 22072 - DNA, 22 bp, Artificial Sequence
  source: /note="Description of Artificial Sequence: Synthetic oligonucleotide"
  source: /note="Description of Combined DNA/RNA Molecule: Synthetic oligonucleotide"
  source: /note="DNA/RNA"
  source: /note="5' tri-ethylene glycol (TEG)"
  modified_base (1)..(1): 5-methyl bicyclic nucleic acid
  modified_base (2)..(2): bicyclic nucleic acid (BNA)
  modified_base (3)..(3): 5-methyl modified nucleotide
  modified_base (4)..(4): 5-methyl modified nucleotide
  modified_base (7)..(7): 5-methyl modified nucleotide
  modified_base (10)..(10): 5-methyl modified nucleotide
  modified_base (21)..(21): bicyclic nucleic acid (BNA)
  modified_base (22)..(22): 5-methyl bicyclic nucleic acid
  source: /note="3' tri-ethylene glycol (TEG)"
ctccaacaucaaggaagauggc

SEQ ID NO: 22073 - DNA, 21 bp, Artificial Sequence
  source: /note="Description of Artificial Sequence: Synthetic oligonucleotide"
  source: /note="Description of Combined DNA/RNA Molecule: Synthetic oligonucleotide"
  source: /note="DNA/RNA"
  source: /note="5' tri-ethylene glycol (TEG)"
  modified_base (1)..(1): 5-methyl bicyclic nucleic acid
  modified_base (2)..(2): bicyclic nucleic acid (BNA)
  modified_base (3)..(3): 5-methyl modified nucleotide
  modified_base (4)..(4): 5-methyl modified nucleotide
  modified_base (7)..(7): 5-methyl modified nucleotide
  modified_base (10)..(10): 5-methyl modified nucleotide
  modified_base (20)..(20): bicyclic nucleic acid (BNA)
  modified_base (21)..(21): bicyclic nucleic acid (BNA)
  source: /note="3' tri-ethylene glycol (TEG)"
ctccaacaucaaggaagaugg

SEQ ID NO: 22074 - DNA, 20 bp, Artificial Sequence
  source: /note="Description of Artificial Sequence: Synthetic oligonucleotide"
  source: /note="Description of Combined DNA/RNA Molecule: Synthetic oligonucleotide"
  source: /note="DNA/RNA"
  source: /note="5' tri-ethylene glycol (TEG)"
  modified_base (1)..(1): 5-methyl bicyclic nucleic acid
  modified_base (2)..(2): bicyclic nucleic acid (BNA)
  modified_base (3)..(3): 5-methyl modified nucleotide
  modified_base (4)..(4): 5-methyl modified nucleotide
  modified_base (7)..(7): 5-methyl modified nucleotide
  modified_base (10)..(10): 5-methyl modified nucleotide
  modified_base (19)..(19): bicyclic nucleic acid (BNA)
  modified_base (20)..(20): bicyclic nucleic acid (BNA)
  source: /note="3' tri-ethylene glycol (TEG)"
ctccaacaucaaggaagatg

SEQ ID NO: 22075 - DNA, 19 bp, Artificial Sequence
  source: /note="Description of Artificial Sequence: Synthetic oligonucleotide"
  source: /note="Description of Combined DNA/RNA Molecule: Synthetic oligonucleotide"
  source: /note="DNA/RNA"
  source: /note="5' tri-ethylene glycol (TEG)"
  modified_base (1)..(1): 5-methyl bicyclic nucleic acid
  modified_base (2)..(2): bicyclic nucleic acid (BNA)
  modified_base (3)..(3): 5-methyl modified nucleotide
  modified_base (4)..(4): 5-methyl modified nucleotide
  modified_base (7)..(7): 5-methyl modified nucleotide
  modified_base (10)..(10): 5-methyl modified nucleotide
  modified_base (18)..(18): bicyclic nucleic acid (BNA)
  modified_base (19)..(19): bicyclic nucleic acid (BNA)
  source: /note="3' tri-ethylene glycol (TEG)"
ctccaacaucaaggaagat

SEQ ID NO: 22076 - DNA, 18 bp, Artificial Sequence
  source: /note="Description of Artificial Sequence: Synthetic oligonucleotide"
  source: /note="Description of Combined DNA/RNA Molecule: Synthetic oligonucleotide"
  source: /note="DNA/RNA"
  source: /note="5' tri-ethylene glycol (TEG)"
  modified_base (1)..(1): 5-methyl bicyclic nucleic acid
  modified_base (2)..(2): bicyclic nucleic acid (BNA)
  modified_base (3)..(3): 5-methyl modified nucleotide
  modified_base (4)..(4): 5-methyl modified nucleotide
  modified_base (7)..(7): 5-methyl modified nucleotide
  modified_base (10)..(10): 5-methyl modified nucleotide
  modified_base (17)..(17): bicyclic nucleic acid (BNA)
  modified_base (18)..(18): bicyclic nucleic acid (BNA)
  source: /note="3' tri-ethylene glycol (TEG)"
ctccaacaucaaggaaga

SEQ ID NO: 22077 - DNA, 17 bp, Artificial Sequence
  source: /note="Description of Artificial Sequence: Synthetic oligonucleotide"
  source: /note="Description of Combined DNA/RNA Molecule: Synthetic oligonucleotide"
  source: /note="DNA/RNA"
  source: /note="5' tri-ethylene glycol (TEG)"
  modified_base (1)..(1): 5-methyl bicyclic nucleic acid
  modified_base (2)..(2): bicyclic nucleic acid (BNA)
  modified_base (3)..(3): 5-methyl modified nucleotide
  modified_base (4)..(4): 5-methyl modified nucleotide
  modified_base (7)..(7): 5-methyl modified nucleotide
  modified_base (10)..(10): 5-methyl modified nucleotide
  modified_base (16)..(16): bicyclic nucleic acid (BNA)
  modified_base (17)..(17): bicyclic nucleic acid (BNA)
  source: /note="3' tri-ethylene glycol (TEG)"
ctccaacaucaaggaag

SEQ ID NO: 22078 - DNA, 29 bp, Artificial Sequence
  source: /note="Description of Artificial Sequence: Synthetic oligonucleotide"
  source: /note="Description of Combined DNA/RNA Molecule: Synthetic oligonucleotide"
  source: /note="DNA/RNA"
  source: /note="5' tri-ethylene glycol (TEG)"
  modified_base (1)..(1): bicyclic nucleic acid (BNA)
  modified_base (2)..(2): 5-methyl bicyclic nucleic acid
  modified_base (3)..(3): 5-methyl modified nucleotide
  modified_base (6)..(6): 5-methyl modified nucleotide
  modified_base (9)..(9): 5-methyl modified nucleotide
  modified_base (21)..(21): 5-methyl modified nucleotide
  modified_base (26)..(26): 5-methyl modified nucleotide
  modified_base (28)..(28): bicyclic nucleic acid (BNA)
  modified_base (29)..(29): bicyclic nucleic acid (BNA)
  source: /note="3' tri-ethylene glycol (TEG)"
tccaacaucaaggaagauggcauuucuag

SEQ ID NO: 22079 - DNA, 28 bp, Artificial Sequence
  source: /note="Description of Artificial Sequence: Synthetic oligonucleotide"
  source: /note="Description of Combined DNA/RNA Molecule: Synthetic oligonucleotide"
  source: /note="DNA/RNA"
  source: /note="5' tri-ethylene glycol (TEG)"
  modified_base (1)..(1): bicyclic nucleic acid (BNA)
  modified_base (2)..(2): 5-methyl bicyclic nucleic acid
  modified_base (3)..(3): 5-methyl modified nucleotide
  modified_base (6)..(6): 5-methyl modified nucleotide
  modified_base (9)..(9): 5-methyl modified nucleotide
  modified_base (21)..(21): 5-methyl modified nucleotide
  modified_base (26)..(26): 5-methyl modified nucleotide
  modified_base (27)..(27): bicyclic nucleic acid (BNA)
  modified_base (28)..(28): bicyclic nucleic acid (BNA)
  source: /note="3' tri-ethylene glycol (TEG)"
tccaacaucaaggaagauggcauuucta

SEQ ID NO: 22080 - DNA, 27 bp, Artificial Sequence
  source: /note="Description of Artificial Sequence: Synthetic oligonucleotide"
  source: /note="Description of Combined DNA/RNA Molecule: Synthetic oligonucleotide"
  source: /note="DNA/RNA"
  source: /note="5' tri-ethylene glycol (TEG)"
  modified_base (1)..(1): bicyclic nucleic acid (BNA)
  modified_base (2)..(2): 5-methyl bicyclic nucleic acid
  modified_base (3)..(3): 5-methyl modified nucleotide
  modified_base (6)..(6): 5-methyl modified nucleotide
  modified_base (9)..(9): 5-methyl modified nucleotide
  modified_base (21)..(21): 5-methyl modified nucleotide
  modified_base (26)..(26): 5-methyl bicyclic nucleic acid
  modified_base (27)..(27): bicyclic nucleic acid (BNA)
  source: /note="3' tri-ethylene glycol (TEG)"
tccaacaucaaggaagauggcauuuct

SEQ ID NO: 22081 - DNA, 26 bp, Artificial Sequence
  source: /note="Description of Artificial Sequence: Synthetic oligonucleotide"
  source: /note="Description of Combined DNA/RNA Molecule: Synthetic oligonucleotide"
  source: /note="DNA/RNA"
  source: /note="5' tri-ethylene glycol (TEG)"
  modified_base (1)..(1): bicyclic nucleic acid (BNA)
  modified_base (2)..(2): 5-methyl bicyclic nucleic acid
  modified_base (3)..(3): 5-methyl modified nucleotide
  modified_base (6)..(6): 5-methyl modified nucleotide
  modified_base (9)..(9): 5-methyl modified nucleotide
  modified_base (21)..(21): 5-methyl modified nucleotide
  modified_base (25)..(25): bicyclic nucleic acid (BNA)
  modified_base (26)..(26): 5-methyl bicyclic nucleic acid
  source: /note="3' tri-ethylene glycol (TEG)"
tccaacaucaaggaagauggcauutc

SEQ ID NO: 22082 - DNA, 25 bp, Artificial Sequence
  source: /note="Description of Artificial Sequence: Synthetic oligonucleotide"
  source: /note="Description of Combined DNA/RNA Molecule: Synthetic oligonucleotide"
  source: /note="DNA/RNA"
  source: /note="5' tri-ethylene glycol (TEG)"
  modified_base (1)..(1): bicyclic nucleic acid (BNA)
  modified_base (2)..(2): 5-methyl bicyclic nucleic acid
  modified_base (3)..(3): 5-methyl modified nucleotide
  modified_base (6)..(6): 5-methyl modified nucleotide
  modified_base (9)..(9): 5-methyl modified nucleotide
  modified_base (21)..(21): 5-methyl modified nucleotide
  modified_base (24)..(24): bicyclic nucleic acid (BNA)
  modified_base (25)..(25): bicyclic nucleic acid (BNA)
  source: /note="3' tri-ethylene glycol (TEG)"
tccaacaucaaggaagauggcautt

SEQ ID NO: 22083 - DNA, 24 bp, Artificial Sequence
  source: /note="Description of Artificial Sequence: Synthetic oligonucleotide"
  source: /note="Description of Combined DNA/RNA Molecule: Synthetic oligonucleotide"
  source: /note="DNA/RNA"
  source: /note="5' tri-ethylene glycol (TEG)"
  modified_base (1)..(1): bicyclic nucleic acid (BNA)
  modified_base (2)..(2): 5-methyl bicyclic nucleic acid
  modified_base (3)..(3): 5-methyl modified nucleotide
  modified_base (6)..(6): 5-methyl modified nucleotide
  modified_base (9)..(9): 5-methyl modified nucleotide
  modified_base (21)..(21): 5-methyl modified nucleotide
  modified_base (23)..(23): bicyclic nucleic acid (BNA)
  modified_base (24)..(24): bicyclic nucleic acid (BNA)
  source: /note="3' tri-ethylene glycol (TEG)"
tccaacaucaaggaagauggcatt

SEQ ID NO: 22084 - DNA, 23 bp, Artificial Sequence
  source: /note="Description of Artificial Sequence: Synthetic oligonucleotide"
  source: /note="Description of Combined DNA/RNA Molecule: Synthetic oligonucleotide"
  source: /note="DNA/RNA"
  source: /note="5' tri-ethylene glycol (TEG)"
  modified_base (1)..(1): bicyclic nucleic acid (BNA)
  modified_base (2)..(2): 5-methyl bicyclic nucleic acid
  modified_base (3)..(3): 5-methyl modified nucleotide
  modified_base (6)..(6): 5-methyl modified nucleotide
  modified_base (9)..(9): 5-methyl modified nucleotide
  modified_base (21)..(21): 5-methyl modified nucleotide
  modified_base (22)..(22): bicyclic nucleic acid (BNA)
  modified_base (23)..(23): bicyclic nucleic acid (BNA)
  source: /note="3' tri-ethylene glycol (TEG)"
tccaacaucaaggaagauggcat

SEQ ID NO: 22085 - DNA, 22 bp, Artificial Sequence
  source: /note="Description of Artificial Sequence: Synthetic oligonucleotide"
  source: /note="Description of Combined DNA/RNA Molecule: Synthetic oligonucleotide"
  source: /note="DNA/RNA"
  source: /note="5' tri-ethylene glycol (TEG)"
  modified_base (1)..(1): bicyclic nucleic acid (BNA)
  modified_base (2)..(2): 5-methyl bicyclic nucleic acid
  modified_base (3)..(3): 5-methyl modified nucleotide
  modified_base (6)..(6): 5-methyl modified nucleotide
  modified_base (9)..(9): 5-methyl modified nucleotide
  modified_base (21)..(21): 5-methyl bicyclic nucleic acid
  modified_base (22)..(22): bicyclic nucleic acid (BNA)
  source: /note="3' tri-ethylene glycol (TEG)"
tccaacaucaaggaagauggca

SEQ ID NO: 22086 - DNA, 21 bp, Artificial Sequence
  source: /note="Description of Artificial Sequence: Synthetic oligonucleotide"
  source: /note="Description of Combined DNA/RNA Molecule: Synthetic oligonucleotide"
  source: /note="DNA/RNA"
  source: /note="5' tri-ethylene glycol (TEG)"
  modified_base (1)..(1): bicyclic nucleic acid (BNA)
  modified_base (2)..(2): 5-methyl bicyclic nucleic acid
  modified_base (3)..(3): 5-methyl modified nucleotide
  modified_base (6)..(6): 5-methyl modified nucleotide
  modified_base (9)..(9): 5-methyl modified nucleotide
  modified_base (20)..(20): bicyclic nucleic acid (BNA)
  modified_base (21)..(21): 5-methyl bicyclic nucleic acid
  source: /note="3' tri-ethylene glycol (TEG)"
tccaacaucaaggaagauggc

SEQ ID NO: 22087 - DNA, 20 bp, Artificial Sequence
  source: /note="Description of Artificial Sequence: Synthetic oligonucleotide"
  source: /note="Description of Combined DNA/RNA Molecule: Synthetic oligonucleotide"
  source: /note="DNA/RNA"
  source: /note="5' tri-ethylene glycol (TEG)"
  modified_base (1)..(1): bicyclic nucleic acid (BNA)
  modified_base (2)..(2): 5-methyl bicyclic nucleic acid
  modified_base (3)..(3): 5-methyl modified nucleotide
  modified_base (6)..(6): 5-methyl modified nucleotide
  modified_base (9)..(9): 5-methyl modified nucleotide
  modified_base (19)..(19): bicyclic nucleic acid (BNA)
  modified_base (20)..(20): bicyclic nucleic acid (BNA)
  source: /note="3' tri-ethylene glycol (TEG)"
tccaacaucaaggaagaugg

SEQ ID NO: 22088 - DNA, 19 bp, Artificial Sequence
  source: /note="Description of Artificial Sequence: Synthetic oligonucleotide"
  source: /note="Description of Combined DNA/RNA Molecule: Synthetic oligonucleotide"
  source: /note="DNA/RNA"
  source: /note="5' tri-ethylene glycol (TEG)"
  modified_base (1)..(1): bicyclic nucleic acid (BNA)
  modified_base (2)..(2): 5-methyl bicyclic nucleic acid
  modified_base (3)..(3): 5-methyl modified nucleotide
  modified_base (6)..(6): 5-methyl modified nucleotide
  modified_base (9)..(9): 5-methyl modified nucleotide
  modified_base (18)..(18): bicyclic nucleic acid (BNA)
  modified_base (19)..(19): bicyclic nucleic acid (BNA)
  source: /note="3' tri-ethylene glycol (TEG)"
tccaacaucaaggaagatg

SEQ ID NO: 22089 - DNA, 18 bp, Artificial Sequence
  source: /note="Description of Artificial Sequence: Synthetic oligonucleotide"
  source: /note="Description of Combined DNA/RNA Molecule: Synthetic oligonucleotide"
  source: /note="DNA/RNA"
  source: /note="5' tri-ethylene glycol (TEG)"
  modified_base (1)..(1): bicyclic nucleic acid (BNA)
  modified_base (2)..(2): 5-methyl bicyclic nucleic acid
  modified_base (3)..(3): 5-methyl modified nucleotide
  modified_base (6)..(6): 5-methyl modified nucleotide
  modified_base (9)..(9): 5-methyl modified nucleotide
  modified_base (17)..(17): bicyclic nucleic acid (BNA)
  modified_base (18)..(18): bicyclic nucleic acid (BNA)
  source: /note="3' tri-ethylene glycol (TEG)"
tccaacaucaaggaagat

SEQ ID NO: 22090 - DNA, 17 bp, Artificial Sequence
  source: /note="Description of Artificial Sequence: Synthetic oligonucleotide"
  source: /note="Description of Combined DNA/RNA Molecule: Synthetic oligonucleotide"
  source: /note="DNA/RNA"
  source: /note="5' tri-ethylene glycol (TEG)"
  modified_base (1)..(1): bicyclic nucleic acid (BNA)
  modified_base (2)..(2): 5-methyl bicyclic nucleic acid
  modified_base (3)..(3): 5-methyl modified nucleotide
  modified_base (6)..(6): 5-methyl modified nucleotide
  modified_base (9)..(9): 5-methyl modified nucleotide
  modified_base (16)..(16): bicyclic nucleic acid (BNA)
  modified_base (17)..(17): bicyclic nucleic acid (BNA)
  source: /note="3' tri-ethylene glycol (TEG)"
tccaacaucaaggaaga

SEQ ID NO: 22091 - DNA, 16 bp, Artificial Sequence
  source: /note="Description of Artificial Sequence: Synthetic oligonucleotide"
  source: /note="Description of Combined DNA/RNA Molecule: Synthetic oligonucleotide"
  source: /note="DNA/RNA"
  source: /note="5' tri-ethylene glycol (TEG)"
  modified_base (1)..(1): bicyclic nucleic acid (BNA)
  modified_base (2)..(2): 5-methyl bicyclic nucleic acid
  modified_base (3)..(3): 5-methyl modified nucleotide
  modified_base (6)..(6): 5-methyl modified nucleotide
  modified_base (9)..(9): 5-methyl modified nucleotide
  modified_base (15)..(15): bicyclic nucleic acid (BNA)
  modified_base (16)..(16): bicyclic nucleic acid (BNA)
  source: /note="3' tri-ethylene glycol (TEG)"
tccaacaucaaggaag

SEQ ID NO: 22092 - RNA, 28 nt, Artificial Sequence
  source: /note="Description of Artificial Sequence: Synthetic oligonucleotide"
  source: /note="RNA"
  source: /note="5' tri-ethylene glycol (TEG)"
  modified_base (1)..(1): 5-methyl bicyclic nucleic acid
  modified_base (2)..(2): 5-methyl bicyclic nucleic acid
  modified_base (5)..(5): 5-methyl modified nucleotide
  modified_base (8)..(8): 5-methyl modified nucleotide
  modified_base (20)..(20): 5-methyl modified nucleotide
  modified_base (25)..(25): 5-methyl modified nucleotide
  modified_base (27)..(27): bicyclic nucleic acid (BNA)
  modified_base (28)..(28): bicyclic nucleic acid (BNA)
  source: /note="3' tri-ethylene glycol (TEG)"
ccaacaucaaggaagauggcauuucuag

SEQ ID NO: 22093 - DNA, 27 bp, Artificial Sequence
  source: /note="Description of Artificial Sequence: Synthetic oligonucleotide"
  source: /note="Description of Combined DNA/RNA Molecule: Synthetic oligonucleotide"
  source: /note="DNA/RNA"
  source: /note="5' tri-ethylene glycol (TEG)"
  modified_base (1)..(1): 5-methyl bicyclic nucleic acid
  modified_base (2)..(2): 5-methyl bicyclic nucleic acid
  modified_base (5)..(5): 5-methyl modified nucleotide
  modified_base (8)..(8): 5-methyl modified nucleotide
  modified_base (20)..(20): 5-methyl modified nucleotide
  modified_base (25)..(25): 5-methyl modified nucleotide
  modified_base (26)..(26): bicyclic nucleic acid (BNA)
  modified_base (27)..(27): bicyclic nucleic acid (BNA)
  source: /note="3' tri-ethylene glycol (TEG)"
ccaacaucaaggaagauggcauuucta

SEQ ID NO: 22094 - DNA, 26 bp, Artificial Sequence
  source: /note="Description of Artificial Sequence: Synthetic oligonucleotide"
  source: /note="Description of Combined DNA/RNA Molecule: Synthetic oligonucleotide"
  source: /note="DNA/RNA"
  source: /note="5' tri-ethylene glycol (TEG)"
  modified_base (1)..(1): 5-methyl bicyclic nucleic acid
  modified_base (2)..(2): 5-methyl bicyclic nucleic acid
  modified_base (5)..(5): 5-methyl modified nucleotide
  modified_base (8)..(8): 5-methyl modified nucleotide
  modified_base (20)..(20): 5-methyl modified nucleotide
  modified_base (25)..(25): 5-methyl bicyclic nucleic acid
  modified_base (26)..(26): bicyclic nucleic acid (BNA)
  source: /note="3' tri-ethylene glycol (TEG)"
ccaacaucaaggaagauggcauuuct

SEQ ID NO: 22095 - DNA, 25 bp, Artificial Sequence
  source: /note="Description of Artificial Sequence: Synthetic oligonucleotide"
  source: /note="Description of Combined DNA/RNA Molecule: Synthetic oligonucleotide"
  source: /note="DNA/RNA"
  source: /note="5' tri-ethylene glycol (TEG)"
  modified_base (1)..(1): 5-methyl bicyclic nucleic acid
  modified_base (2)..(2): 5-methyl bicyclic nucleic acid
  modified_base (5)..(5): 5-methyl modified nucleotide
  modified_base (8)..(8): 5-methyl modified nucleotide
  modified_base (20)..(20): 5-methyl modified nucleotide
  modified_base (24)..(24): bicyclic nucleic acid (BNA)
  modified_base (25)..(25): 5-methyl bicyclic nucleic acid
  source: /note="3' tri-ethylene glycol (TEG)"
ccaacaucaaggaagauggcauutc

SEQ ID NO: 22096 - DNA, 24 bp, Artificial Sequence
  source: /note="Description of Artificial Sequence: Synthetic oligonucleotide"
  source: /note="Description of Combined DNA/RNA Molecule: Synthetic oligonucleotide"
  source: /note="DNA/RNA"
  source: /note="5' tri-ethylene glycol (TEG)"
  modified_base (1)..(1): 5-methyl bicyclic nucleic acid
  modified_base (2)..(2): 5-methyl bicyclic nucleic acid
  modified_base (5)..(5): 5-methyl modified nucleotide
  modified_base (8)..(8): 5-methyl modified nucleotide
  modified_base (20)..(20): 5-methyl modified nucleotide
  modified_base (23)..(23): bicyclic nucleic acid (BNA)
  modified_base (24)..(24): bicyclic nucleic acid (BNA)
  source: /note="3' tri-ethylene glycol (TEG)"
ccaacaucaaggaagauggcautt

SEQ ID NO: 22097 - DNA, 23 bp, Artificial Sequence
  source: /note="Description of Artificial Sequence: Synthetic oligonucleotide"
  source: /note="Description of Combined DNA/RNA Molecule: Synthetic oligonucleotide"
  source: /note="DNA/RNA"
  source: /note="5' tri-ethylene glycol (TEG)"
  modified_base (1)..(1): 5-methyl bicyclic nucleic acid
  modified_base (2)..(2): 5-methyl bicyclic nucleic acid
  modified_base (5)..(5): 5-methyl modified nucleotide
  modified_base (8)..(8): 5-methyl modified nucleotide
  modified_base (20)..(20): 5-methyl modified nucleotide
  modified_base (22)..(22): bicyclic nucleic acid (BNA)
  modified_base (23)..(23): bicyclic nucleic acid (BNA)
  source: /note="3' tri-ethylene glycol (TEG)"
ccaacaucaaggaagauggcatt

SEQ ID NO: 22098 - DNA, 22 bp, Artificial Sequence
  source: /note="Description of Artificial Sequence: Synthetic oligonucleotide"
  source: /note="Description of Combined DNA/RNA Molecule: Synthetic oligonucleotide"
  source: /note="DNA/RNA"
  source: /note="5' tri-ethylene glycol (TEG)"
  modified_base (1)..(1): 5-methyl bicyclic nucleic acid
  modified_base (2)..(2): 5-methyl bicyclic nucleic acid
  modified_base (5)..(5): 5-methyl modified nucleotide
  modified_base (8)..(8): 5-methyl modified nucleotide
  modified_base (20)..(20): 5-methyl modified nucleotide
  modified_base (21)..(21): bicyclic nucleic acid (BNA)
  modified_base (22)..(22): bicyclic nucleic acid (BNA)
  source: /note="3' tri-ethylene glycol (TEG)"
ccaacaucaaggaagauggcat

SEQ ID NO: 22099 - RNA, 21 nt, Artificial Sequence
  source: /note="Description of Artificial Sequence: Synthetic oligonucleotide"
  source: /note="RNA"
  source: /note="5' tri-ethylene glycol (TEG)"
  modified_base (1)..(1): 5-methyl bicyclic nucleic acid
  modified_base (2)..(2): 5-methyl bicyclic nucleic acid
  modified_base (5)..(5): 5-methyl modified nucleotide
  modified_base (8)..(8): 5-methyl modified nucleotide
  modified_base (20)..(20): 5-methyl bicyclic nucleic acid
  modified_base (21)..(21): bicyclic nucleic acid (BNA)
  source: /note="3' tri-ethylene glycol (TEG)"
ccaacaucaaggaagauggca

SEQ ID NO: 22100 - RNA, 20 nt, Artificial Sequence
  source: /note="Description of Artificial Sequence: Synthetic oligonucleotide"
  source: /note="RNA"
  source: /note="5' tri-ethylene glycol (TEG)"
  modified_base (1)..(1): 5-methyl bicyclic nucleic acid
  modified_base (2)..(2): 5-methyl bicyclic nucleic acid
  modified_base (5)..(5): 5-methyl modified nucleotide
  modified_base (8)..(8): 5-methyl modified nucleotide
  modified_base (19)..(19): bicyclic nucleic acid (BNA)
  modified_base (20)..(20): 5-methyl bicyclic nucleic acid
  source: /note="3' tri-ethylene glycol (TEG)"
ccaacaucaaggaagauggc

SEQ ID NO: 22101 - RNA, 19 nt, Artificial Sequence
  source: /note="Description of Artificial Sequence: Synthetic oligonucleotide"
  source: /note="RNA"
  source: /note="5' tri-ethylene glycol (TEG)"
  modified_base (1)..(1): 5-methyl bicyclic nucleic acid
  modified_base (2)..(2): 5-methyl bicyclic nucleic acid
  modified_base (5)..(5): 5-methyl modified nucleotide
  modified_base (8)..(8): 5-methyl modified nucleotide
  modified_base (18)..(18): bicyclic nucleic acid (BNA)
  modified_base (19)..(19): bicyclic nucleic acid (BNA)
  source: /note="3' tri-ethylene glycol (TEG)"
ccaacaucaaggaagaugg

SEQ ID NO: 22102 - DNA, 18 bp, Artificial Sequence
  source: /note="Description of Artificial Sequence: Synthetic oligonucleotide"
  source: /note="Description of Combined DNA/RNA Molecule: Synthetic oligonucleotide"
  source: /note="DNA/RNA"
  source: /note="5' tri-ethylene glycol (TEG)"
  modified_base (1)..(1): 5-methyl bicyclic nucleic acid
  modified_base (2)..(2): 5-methyl bicyclic nucleic acid
  modified_base (5)..(5): 5-methyl modified nucleotide
  modified_base (8)..(8): 5-methyl modified nucleotide
  modified_base (17)..(17): bicyclic nucleic acid (BNA)
  modified_base (18)..(18): bicyclic nucleic acid (BNA)
  source: /note="3' tri-ethylene glycol (TEG)"
ccaacaucaaggaagatg

SEQ ID NO: 22103 - DNA, 17 bp, Artificial Sequence
  source: /note="Description of Artificial Sequence: Synthetic oligonucleotide"
  source: /note="Description of Combined DNA/RNA Molecule: Synthetic oligonucleotide"
  source: /note="DNA/RNA"
  source: /note="5' tri-ethylene glycol (TEG)"
  modified_base (1)..(1): 5-methyl bicyclic nucleic acid
  modified_base (2)..(2): 5-methyl bicyclic nucleic acid
  modified_base (5)..(5): 5-methyl modified nucleotide
  modified_base (8)..(8): 5-methyl modified nucleotide
  modified_base (16)..(16): bicyclic nucleic acid (BNA)
  modified_base (17)..(17): bicyclic nucleic acid (BNA)
  source: /note="3' tri-ethylene glycol (TEG)"
ccaacaucaaggaagat

SEQ ID NO: 22104 - RNA, 16 nt, Artificial Sequence
  source: /note="Description of Artificial Sequence: Synthetic oligonucleotide"
  source: /note="RNA"
  source: /note="5' tri-ethylene glycol (TEG)"
  modified_base (1)..(1): 5-methyl bicyclic nucleic acid
  modified_base (2)..(2): 5-methyl bicyclic nucleic acid
  modified_base (5)..(5): 5-methyl modified nucleotide
  modified_base (8)..(8): 5-methyl modified nucleotide
  modified_base (15)..(15): bicyclic nucleic acid (BNA)
  modified_base (16)..(16): bicyclic nucleic acid (BNA)
  source: /note="3' tri-ethylene glycol (TEG)"
ccaacaucaaggaaga

SEQ ID NO: 22105 - RNA, 15 nt, Artificial Sequence
  source: /note="Description of Artificial Sequence: Synthetic oligonucleotide"
  source: /note="RNA"
  source: /note="5' tri-ethylene glycol (TEG)"
  modified_base (1)..(1): 5-methyl bicyclic nucleic acid
  modified_base (2)..(2): 5-methyl bicyclic nucleic acid
  modified_base (5)..(5): 5-methyl modified nucleotide
  modified_base (8)..(8): 5-methyl modified nucleotide
  modified_base (14)..(14): bicyclic nucleic acid (BNA)
  modified_base (15)..(15): bicyclic nucleic acid (BNA)
  source: /note="3' tri-ethylene glycol (TEG)"
ccaacaucaaggaag

SEQ ID NO: 22106 - RNA, 27 nt, Artificial Sequence
  source: /note="Description of Artificial Sequence: Synthetic oligonucleotide"
  source: /note="RNA"
  source: /note="5' tri-ethylene glycol (TEG)"
  modified_base (1)..(1): 5-methyl bicyclic nucleic acid
  modified_base (2)..(2): bicyclic nucleic acid (BNA)
  modified_base (4)..(4): 5-methyl modified nucleotide
  modified_base (7)..(7): 5-methyl modified nucleotide
  modified_base (19)..(19): 5-methyl modified nucleotide
  modified_base (24)..(24): 5-methyl modified nucleotide
  modified_base (26)..(26): bicyclic nucleic acid (BNA)
  modified_base (27)..(27): bicyclic nucleic acid (BNA)
  source: /note="3' tri-ethylene glycol (TEG)"
caacaucaaggaagauggcauuucuag

SEQ ID NO: 22107 - DNA, 26 bp, Artificial Sequence
  source: /note="Description of Artificial Sequence: Synthetic oligonucleotide"
  source: /note="Description of Combined DNA/RNA Molecule: Synthetic oligonucleotide"
  source: /note="DNA/RNA"
  source: /note="5' tri-ethylene glycol (TEG)"
  modified_base (1)..(1): 5-methyl bicyclic nucleic acid
  modified_base (2)..(2): bicyclic nucleic acid (BNA)
  modified_base (4)..(4): 5-methyl modified nucleotide
  modified_base (7)..(7): 5-methyl modified nucleotide
  modified_base (19)..(19): 5-methyl modified nucleotide
  modified_base (24)..(24): 5-methyl modified nucleotide
  modified_base (25)..(25): bicyclic nucleic acid (BNA)
  modified_base (26)..(26): bicyclic nucleic acid (BNA)
  source: /note="3' tri-ethylene glycol (TEG)"
caacaucaaggaagauggcauuucta

SEQ ID NO: 22108 - DNA, 25 bp, Artificial Sequence
  source: /note="Description of Artificial Sequence: Synthetic oligonucleotide"
  source: /note="Description of Combined DNA/RNA Molecule: Synthetic oligonucleotide"
  source: /note="DNA/RNA"
  source: /note="5' tri-ethylene glycol (TEG)"
  modified_base (1)..(1): 5-methyl bicyclic nucleic acid
  modified_base (2)..(2): bicyclic nucleic acid (BNA)
  modified_base (4)..(4): 5-methyl modified nucleotide
  modified_base (7)..(7): 5-methyl modified nucleotide
  modified_base (19)..(19): 5-methyl modified nucleotide
  modified_base (24)..(24): 5-methyl bicyclic nucleic acid
  modified_base (25)..(25): bicyclic nucleic acid (BNA)
  source: /note="3' tri-ethylene glycol (TEG)"
caacaucaaggaagauggcauuuct

SEQ ID NO: 22109 - DNA, 24 bp, Artificial Sequence
  source: /note="Description of Artificial Sequence: Synthetic oligonucleotide"
  source: /note="Description of Combined DNA/RNA Molecule: Synthetic oligonucleotide"
  source: /note="DNA/RNA"
  source: /note="5' tri-ethylene glycol (TEG)"
  modified_base (1)..(1): 5-methyl bicyclic nucleic acid
  modified_base (2)..(2): bicyclic nucleic acid (BNA)
  modified_base (4)..(4): 5-methyl modified nucleotide
  modified_base (7)..(7): 5-methyl modified nucleotide
  modified_base (19)..(19): 5-methyl modified nucleotide
  modified_base (23)..(23): bicyclic nucleic acid (BNA)
  modified_base (24)..(24): 5-methyl bicyclic nucleic acid
  source: /note="3' tri-ethylene glycol (TEG)"
caacaucaaggaagauggcauutc

SEQ ID NO: 22110 - DNA, 23 bp, Artificial Sequence
  source: /note="Description of Artificial Sequence: Synthetic oligonucleotide"
  source: /note="Description of Combined DNA/RNA Molecule: Synthetic oligonucleotide"
  source: /note="DNA/RNA"
  source: /note="5' tri-ethylene glycol (TEG)"
  modified_base (1)..(1): 5-methyl bicyclic nucleic acid
  modified_base (2)..(2): bicyclic nucleic acid (BNA)
  modified_base (4)..(4): 5-methyl modified nucleotide
  modified_base (7)..(7): 5-methyl modified nucleotide
  modified_base (19)..(19): 5-methyl modified nucleotide
  modified_base (22)..(22): bicyclic nucleic acid (BNA)
  modified_base (23)..(23): bicyclic nucleic acid (BNA)
  source: /note="3' tri-ethylene glycol (TEG)"
caacaucaaggaagauggcautt

SEQ ID NO: 22111 - DNA, 22 bp, Artificial Sequence
  source: /note="Description of Artificial Sequence: Synthetic oligonucleotide"
  source: /note="Description of Combined DNA/RNA Molecule: Synthetic oligonucleotide"
  source: /note="DNA/RNA"
  source: /note="5' tri-ethylene glycol (TEG)"
  modified_base (1)..(1): 5-methyl bicyclic nucleic acid
  modified_base (2)..(2): bicyclic nucleic acid (BNA)
  modified_base (4)..(4): 5-methyl modified nucleotide
  modified_base (7)..(7): 5-methyl modified nucleotide
  modified_base (19)..(19): 5-methyl modified nucleotide
  modified_base (21)..(21): bicyclic nucleic acid (BNA)
  modified_base (22)..(22): bicyclic nucleic acid (BNA)
  source: /note="3' tri-ethylene glycol (TEG)"
caacaucaaggaagauggcatt

SEQ ID NO: 22112 - DNA, 21 bp, Artificial Sequence
  source: /note="Description of Artificial Sequence: Synthetic oligonucleotide"
  source: /note="Description of Combined DNA/RNA Molecule: Synthetic oligonucleotide"
  source: /note="DNA/RNA"
  source: /note="5' tri-ethylene glycol (TEG)"
  modified_base (1)..(1): 5-methyl bicyclic nucleic acid
  modified_base (2)..(2): bicyclic nucleic acid (BNA)
  modified_base (4)..(4): 5-methyl modified nucleotide
  modified_base (7)..(7): 5-methyl modified nucleotide
  modified_base (19)..(19): 5-methyl modified nucleotide
  modified_base (20)..(20): bicyclic nucleic acid (BNA)
  modified_base (21)..(21): bicyclic nucleic acid (BNA)
  source: /note="3' tri-ethylene glycol (TEG)"
caacaucaaggaagauggcat

SEQ ID NO: 22113 - RNA, 20 nt, Artificial Sequence
  source: /note="Description of Artificial Sequence: Synthetic oligonucleotide"
  source: /note="RNA"
  source: /note="5' tri-ethylene glycol (TEG)"
  modified_base (1)..(1): 5-methyl bicyclic nucleic acid
  modified_base (2)..(2): bicyclic nucleic acid (BNA)
  modified_base (4)..(4): 5-methyl modified nucleotide
  modified_base (7)..(7): 5-methyl modified nucleotide
  modified_base (19)..(19): 5-methyl bicyclic nucleic acid
  modified_base (20)..(20): bicyclic nucleic acid (BNA)
  source: /note="3' tri-ethylene glycol (TEG)"
caacaucaaggaagauggca

SEQ ID NO: 22114 - RNA, 19 nt, Artificial Sequence
  source: /note="Description of Artificial Sequence: Synthetic oligonucleotide"
  source: /note="RNA"
  source: /note="5' tri-ethylene glycol (TEG)"
  modified_base (1)..(1): 5-methyl bicyclic nucleic acid
  modified_base (2)..(2): bicyclic nucleic acid (BNA)
  modified_base (4)..(4): 5-methyl modified nucleotide
  modified_base (7)..(7): 5-methyl modified nucleotide
  modified_base (18)..(18): bicyclic nucleic acid (BNA)
  modified_base (19)..(19): 5-methyl bicyclic nucleic acid
  source: /note="3' tri-ethylene glycol (TEG)"
caacaucaaggaagauggc

SEQ ID NO: 22115 - RNA, 18 nt, Artificial Sequence
  source: /note="Description of Artificial Sequence: Synthetic oligonucleotide"
  source: /note="RNA"
  source: /note="5' tri-ethylene glycol (TEG)"
  modified_base (1)..(1): 5-methyl bicyclic nucleic acid
  modified_base (2)..(2): bicyclic nucleic acid (BNA)
  modified_base (4)..(4): 5-methyl modified nucleotide
  modified_base (7)..(7): 5-methyl modified nucleotide
  modified_base (17)..(17): bicyclic nucleic acid (BNA)
  modified_base (18)..(18): bicyclic nucleic acid (BNA)
  source: /note="3' tri-ethylene glycol (TEG)"
caacaucaaggaagaugg

SEQ ID NO: 22116 - DNA, 17 bp, Artificial Sequence
  source: /note="Description of Artificial Sequence: Synthetic oligonucleotide"
  source: /note="Description of Combined DNA/RNA Molecule: Synthetic oligonucleotide"
  source: /note="DNA/RNA"
  source: /note="5' tri-ethylene glycol (TEG)"
  modified_base (1)..(1): 5-methyl bicyclic nucleic acid
  modified_base (2)..(2): bicyclic nucleic acid (BNA)
  modified_base (4)..(4): 5-methyl modified nucleotide
  modified_base (7)..(7): 5-methyl modified nucleotide
  modified_base (16)..(16): bicyclic nucleic acid (BNA)
  modified_base (17)..(17): bicyclic nucleic acid (BNA)
  source: /note="3' tri-ethylene glycol (TEG)"
caacaucaaggaagatg

SEQ ID NO: 22117 - DNA, 16 bp, Artificial Sequence
  source: /note="Description of Artificial Sequence: Synthetic oligonucleotide"
  source: /note="Description of Combined DNA/RNA Molecule: Synthetic oligonucleotide"
  source: /note="DNA/RNA"
  source: /note="5' tri-ethylene glycol (TEG)"
  modified_base (1)..(1): 5-methyl bicyclic nucleic acid
  modified_base (2)..(2): bicyclic nucleic acid (BNA)
  modified_base (4)..(4): 5-methyl modified nucleotide
  modified_base (7)..(7): 5-methyl modified nucleotide
  modified_base (15)..(15): bicyclic nucleic acid (BNA)
  modified_base (16)..(16): bicyclic nucleic acid (BNA)
  source: /note="3' tri-ethylene glycol (TEG)"
caacaucaaggaagat

SEQ ID NO: 22118 - RNA, 15 nt, Artificial Sequence
  source: /note="Description of Artificial Sequence: Synthetic oligonucleotide"
  source: /note="RNA"
  source: /note="5' tri-ethylene glycol (TEG)"
  modified_base (1)..(1): 5-methyl bicyclic nucleic acid
  modified_base (2)..(2): bicyclic nucleic acid (BNA)
  modified_base (4)..(4): 5-methyl modified nucleotide
  modified_base (7)..(7): 5-methyl modified nucleotide
  modified_base (14)..(14): bicyclic nucleic acid (BNA)
  modified_base (15)..(15): bicyclic nucleic acid (BNA)
  source: /note="3' tri-ethylene glycol (TEG)"
caacaucaaggaaga

SEQ ID NO: 22119 - RNA, 14 nt, Artificial Sequence
  source: /note="Description of Artificial Sequence: Synthetic oligonucleotide"
  source: /note="RNA"
  source: /note="5' tri-ethylene glycol (TEG)"
  modified_base (1)..(1): 5-methyl bicyclic nucleic acid
  modified_base (2)..(2): bicyclic nucleic acid (BNA)
  modified_base (4)..(4): 5-methyl modified nucleotide
  modified_base (7)..(7): 5-methyl modified nucleotide
  modified_base (13)..(13): bicyclic nucleic acid (BNA)
  modified_base (14)..(14): bicyclic nucleic acid (BNA)
  source: /note="3' tri-ethylene glycol (TEG)"
caacaucaaggaag

SEQ ID NO: 22120 - RNA, 26 nt, Artificial Sequence
  source: /note="Description of Artificial Sequence: Synthetic oligonucleotide"
  source: /note="RNA"
  source: /note="5' tri-ethylene glycol (TEG)"
  modified_base (1)..(1): bicyclic nucleic acid (BNA)
  modified_base (2)..(2): bicyclic nucleic acid (BNA)
  modified_base (3)..(3): 5-methyl modified nucleotide
  modified_base (6)..(6): 5-methyl modified nucleotide
  modified_base (18)..(18): 5-methyl modified nucleotide
  modified_base (23)..(23): 5-methyl modified nucleotide
  modified_base (25)..(25): bicyclic nucleic acid (BNA)
  modified_base (26)..(26): bicyclic nucleic acid (BNA)
  source: /note="3' tri-ethylene glycol (TEG)"
aacaucaaggaagauggcauuucuag

SEQ ID NO: 22121 - DNA, 25 bp, Artificial Sequence
  source: /note="Description of Artificial Sequence: Synthetic oligonucleotide"
  source: /note="Description of Combined DNA/RNA Molecule: Synthetic oligonucleotide"
  source: /note="DNA/RNA"
  source: /note="5' tri-ethylene glycol (TEG)"
  modified_base (1)..(1): bicyclic nucleic acid (BNA)
  modified_base (2)..(2): bicyclic nucleic acid (BNA)
  modified_base (3)..(3): 5-methyl modified nucleotide
  modified_base (6)..(6): 5-methyl modified nucleotide
  modified_base (18)..(18): 5-methyl modified nucleotide
  modified_base (23)..(23): 5-methyl modified nucleotide
  modified_base (24)..(24): bicyclic nucleic acid (BNA)
  modified_base (25)..(25): bicyclic nucleic acid (BNA)
  source: /note="3' tri-ethylene glycol (TEG)"
aacaucaaggaagauggcauuucta

SEQ ID NO: 22122 - DNA, 24 bp, Artificial Sequence
  source: /note="Description of Artificial Sequence: Synthetic oligonucleotide"
  source: /note="Description of Combined DNA/RNA Molecule: Synthetic oligonucleotide"
  source: /note="DNA/RNA"
  source: /note="5' tri-ethylene glycol (TEG)"
  modified_base (1)..(1): bicyclic nucleic acid (BNA)
  modified_base (2)..(2): bicyclic nucleic acid (BNA)
  modified_base (3)..(3): 5-methyl modified nucleotide
  modified_base (6)..(6): 5-methyl modified nucleotide
  modified_base (18)..(18): 5-methyl modified nucleotide
  modified_base (23)..(23): 5-methyl bicyclic nucleic acid
  modified_base (24)..(24): bicyclic nucleic acid (BNA)
  source: /note="3' tri-ethylene glycol (TEG)"
aacaucaaggaagauggcauuuct

SEQ ID NO: 22123 - DNA, 23 bp, Artificial Sequence
  source: /note="Description of Artificial Sequence: Synthetic oligonucleotide"
  source: /note="Description of Combined DNA/RNA Molecule: Synthetic oligonucleotide"
  source: /note="DNA/RNA"
  source: /note="5' tri-ethylene glycol (TEG)"
  modified_base (1)..(1): bicyclic nucleic acid (BNA)
  modified_base (2)..(2): bicyclic nucleic acid (BNA)
  modified_base (3)..(3): 5-methyl modified nucleotide
  modified_base (6)..(6): 5-methyl modified nucleotide
  modified_base (18)..(18): 5-methyl modified nucleotide
  modified_base (22)..(22): bicyclic nucleic acid (BNA)
  modified_base (23)..(23): 5-methyl bicyclic nucleic acid
  source: /note="3' tri-ethylene glycol (TEG)"
aacaucaaggaagauggcauutc

SEQ ID NO: 22124 - DNA, 22 bp, Artificial Sequence
  source: /note="Description of Artificial Sequence: Synthetic oligonucleotide"
  source: /note="Description of Combined DNA/RNA Molecule: Synthetic oligonucleotide"
  source: /note="DNA/RNA"
  source: /note="5' tri-ethylene glycol (TEG)"
  modified_base (1)..(1): bicyclic nucleic acid (BNA)
  modified_base (2)..(2): bicyclic nucleic acid (BNA)
  modified_base (3)..(3): 5-methyl modified nucleotide
  modified_base (6)..(6): 5-methyl modified nucleotide
  modified_base (18)..(18): 5-methyl modified nucleotide
  modified_base (21)..(21): bicyclic nucleic acid (BNA)
  modified_base (22)..(22): bicyclic nucleic acid (BNA)
  source: /note="3' tri-ethylene glycol (TEG)"
aacaucaaggaagauggcautt

SEQ ID NO: 22125 - DNA, 21 bp, Artificial Sequence
  source: /note="Description of Artificial Sequence: Synthetic oligonucleotide"
  source: /note="Description of Combined DNA/RNA Molecule: Synthetic oligonucleotide"
  source: /note="DNA/RNA"
  source: /note="5' tri-ethylene glycol (TEG)"
  modified_base (1)..(1): bicyclic nucleic acid (BNA)
  modified_base (2)..(2): bicyclic nucleic acid (BNA)
  modified_base (3)..(3): 5-methyl modified nucleotide
  modified_base (6)..(6): 5-methyl modified nucleotide
  modified_base (18)..(18): 5-methyl modified nucleotide
  modified_base (20)..(20): bicyclic nucleic acid (BNA)
  modified_base (21)..(21): bicyclic nucleic acid (BNA)
  source: /note="3' tri-ethylene glycol (TEG)"
aacaucaaggaagauggcatt

SEQ ID NO: 22126 - DNA, 20 bp, Artificial Sequence
  source: /note="Description of Artificial Sequence: Synthetic oligonucleotide"
  source: /note="Description of Combined DNA/RNA Molecule: Synthetic oligonucleotide"
  source: /note="DNA/RNA"
  source: /note="5' tri-ethylene glycol (TEG)"
  modified_base (1)..(1): bicyclic nucleic acid (BNA)
  modified_base (2)..(2): bicyclic nucleic acid (BNA)
  modified_base (3)..(3): 5-methyl modified nucleotide
  modified_base (6)..(6): 5-methyl modified nucleotide
  modified_base (18)..(18): 5-methyl modified nucleotide
  modified_base (19)..(19): bicyclic nucleic acid (BNA)
  modified_base (20)..(20): bicyclic nucleic acid (BNA)
  source: /note="3' tri-ethylene glycol (TEG)"
aacaucaaggaagauggcat

SEQ ID NO: 22127 - RNA, 19 nt, Artificial Sequence
  source: /note="Description of Artificial Sequence: Synthetic oligonucleotide"
  source: /note="RNA"
  source: /note="5' tri-ethylene glycol (TEG)"
  modified_base (1)..(1): bicyclic nucleic acid (BNA)
  modified_base (2)..(2): bicyclic nucleic acid (BNA)
  modified_base (3)..(3): 5-methyl modified nucleotide
  modified_base (6)..(6): 5-methyl modified nucleotide
  modified_base (18)..(18): 5-methyl bicyclic nucleic acid
  modified_base (19)..(19): bicyclic nucleic acid (BNA)
  source: /note="3' tri-ethylene glycol (TEG)"
aacaucaaggaagauggca

SEQ ID NO: 22128 - RNA, 18 nt, Artificial Sequence
  source: /note="Description of Artificial Sequence: Synthetic oligonucleotide"
  source: /note="RNA"
  source: /note="5' tri-ethylene glycol (TEG)"
  modified_base (1)..(1): bicyclic nucleic acid (BNA)
  modified_base (2)..(2): bicyclic nucleic acid (BNA)
  modified_base (3)..(3): 5-methyl modified nucleotide
  modified_base (6)..(6): 5-methyl modified nucleotide
  modified_base (17)..(17): bicyclic nucleic acid (BNA)
  modified_base (18)..(18): 5-methyl bicyclic nucleic acid
  source: /note="3' tri-ethylene glycol (TEG)"
aacaucaaggaagauggc

SEQ ID NO: 22129 - RNA, 17 nt, Artificial Sequence
  source: /note="Description of Artificial Sequence: Synthetic oligonucleotide"
  source: /note="RNA"
  source: /note="5' tri-ethylene glycol (TEG)"
  modified_base (1)..(1): bicyclic nucleic acid (BNA)
  modified_base (2)..(2): bicyclic nucleic acid (BNA)
  modified_base (3)..(3): 5-methyl modified nucleotide
  modified_base (6)..(6): 5-methyl modified nucleotide
  modified_base (16)..(16): bicyclic nucleic acid (BNA)
  modified_base (17)..(17): bicyclic nucleic acid (BNA)
  source: /note="3' tri-ethylene glycol (TEG)"
aacaucaaggaagaugg

SEQ ID NO: 22130 - DNA, 16 bp, Artificial Sequence
  source: /note="Description of Artificial Sequence: Synthetic oligonucleotide"
  source: /note="Description of Combined DNA/RNA Molecule: Synthetic oligonucleotide"
  source: /note="DNA/RNA"
  source: /note="5' tri-ethylene glycol (TEG)"
  modified_base (1)..(1): bicyclic nucleic acid (BNA)
  modified_base (2)..(2): bicyclic nucleic acid (BNA)
  modified_base (3)..(3): 5-methyl modified nucleotide
  modified_base (6)..(6): 5-methyl modified nucleotide
  modified_base (15)..(15): bicyclic nucleic acid (BNA)
  modified_base (16)..(16): bicyclic nucleic acid (BNA)
  source: /note="3' tri-ethylene glycol (TEG)"
aacaucaaggaagatg

SEQ ID NO: 22131 - DNA, 15 bp, Artificial Sequence
  source: /note="Description of Artificial Sequence: Synthetic oligonucleotide"
  source: /note="Description of Combined DNA/RNA Molecule: Synthetic oligonucleotide"
  source: /note="DNA/RNA"
  source: /note="5' tri-ethylene glycol (TEG)"
  modified_base (1)..(1): bicyclic nucleic acid (BNA)
  modified_base (2)..(2): bicyclic nucleic acid (BNA)
  modified_base (3)..(3): 5-methyl modified nucleotide
  modified_base (6)..(6): 5-methyl modified nucleotide
  modified_base (14)..(14): bicyclic nucleic acid (BNA)
  modified_base (15)..(15): bicyclic nucleic acid (BNA)
  source: /note="3' tri-ethylene glycol (TEG)"
aacaucaaggaagat

SEQ ID NO: 22132 - RNA, 14 nt, Artificial Sequence
  source: /note="Description of Artificial Sequence: Synthetic oligonucleotide"
  source: /note="RNA"
  source: /note="5' tri-ethylene glycol (TEG)"
  modified_base (1)..(1): bicyclic nucleic acid (BNA)
  modified_base (2)..(2): bicyclic nucleic acid (BNA)
  modified_base (3)..(3): 5-methyl modified nucleotide
  modified_base (6)..(6): 5-methyl modified nucleotide
  modified_base (13)..(13): bicyclic nucleic acid (BNA)
  modified_base (14)..(14): bicyclic nucleic acid (BNA)
  source: /note="3' tri-ethylene glycol (TEG)"
aacaucaaggaaga

SEQ ID NO: 22133 - RNA, 13 nt, Artificial Sequence
  source: /note="Description of Artificial Sequence: Synthetic oligonucleotide"
  source: /note="RNA"
  source: /note="5' tri-ethylene glycol (TEG)"
  modified_base (1)..(1): bicyclic nucleic acid (BNA)
  modified_base (2)..(2): bicyclic nucleic acid (BNA)
  modified_base (3)..(3): 5-methyl modified nucleotide
  modified_base (6)..(6): 5-methyl modified nucleotide
  modified_base (12)..(12): bicyclic nucleic acid (BNA)
  modified_base (13)..(13): bicyclic nucleic acid (BNA)
  source: /note="3' tri-ethylene glycol (TEG)"
aacaucaaggaag

SEQ ID NO: 22134 - RNA, 25 nt, Artificial Sequence
  source: /note="Description of Artificial Sequence: Synthetic oligonucleotide"
  source: /note="RNA"
  source: /note="5' tri-ethylene glycol (TEG)"
  modified_base (1)..(1): bicyclic nucleic acid (BNA)
  modified_base (2)..(2): 5-methyl bicyclic nucleic acid
  modified_base (5)..(5): 5-methyl modified nucleotide
  modified_base (17)..(17): 5-methyl modified nucleotide
  modified_base (22)..(22): 5-methyl modified nucleotide
  modified_base (24)..(24): bicyclic nucleic acid (BNA)
  modified_base (25)..(25): bicyclic nucleic acid (BNA)
  source: /note="3' tri-ethylene glycol (TEG)"
acaucaaggaagauggcauuucuag

SEQ ID NO: 22135 - DNA, 24 bp, Artificial Sequence
  source: /note="Description of Artificial Sequence: Synthetic oligonucleotide"
  source: /note="Description of Combined DNA/RNA Molecule: Synthetic oligonucleotide"
  source: /note="DNA/RNA"
  source: /note="5' tri-ethylene glycol (TEG)"
  modified_base (1)..(1): bicyclic nucleic acid (BNA)
  modified_base (2)..(2): 5-methyl bicyclic nucleic acid
  modified_base (5)..(5): 5-methyl modified nucleotide
  modified_base (17)..(17): 5-methyl modified nucleotide
  modified_base (22)..(22): 5-methyl modified nucleotide
  modified_base (23)..(23): bicyclic nucleic acid (BNA)
  modified_base (24)..(24): bicyclic nucleic acid (BNA)
  source: /note="3' tri-ethylene glycol (TEG)"
acaucaaggaagauggcauuucta

SEQ ID NO: 22136 - DNA, 23 bp, Artificial Sequence
  source: /note="Description of Artificial Sequence: Synthetic oligonucleotide"
  source: /note="Description of Combined DNA/RNA Molecule: Synthetic oligonucleotide"
  source: /note="DNA/RNA"
  source: /note="5' tri-ethylene glycol (TEG)"
  modified_base (1)..(1): bicyclic nucleic acid (BNA)
  modified_base (2)..(2): 5-methyl bicyclic nucleic acid
  modified_base (5)..(5): 5-methyl modified nucleotide
  modified_base (17)..(17): 5-methyl modified nucleotide
  modified_base (22)..(22): 5-methyl bicyclic nucleic acid
  modified_base (23)..(23): bicyclic nucleic acid (BNA)
  source: /note="3' tri-ethylene glycol (TEG)"
acaucaaggaagauggcauuuct

SEQ ID NO: 22137 - DNA, 22 bp, Artificial Sequence
  source: /note="Description of Artificial Sequence: Synthetic oligonucleotide"
  source: /note="Description of Combined DNA/RNA Molecule: Synthetic oligonucleotide"
  source: /note="DNA/RNA"
  source: /note="5' tri-ethylene glycol (TEG)"
  modified_base (1)..(1): bicyclic nucleic acid (BNA)
  modified_base (2)..(2): 5-methyl bicyclic nucleic acid
  modified_base (5)..(5): 5-methyl modified nucleotide
  modified_base (17)..(17): 5-methyl modified nucleotide
  modified_base (21)..(21): bicyclic nucleic acid (BNA)
  modified_base (22)..(22): 5-methyl bicyclic nucleic acid
  source: /note="3' tri-ethylene glycol (TEG)"
acaucaaggaagauggcauutc

SEQ ID NO: 22138 - DNA, 21 bp, Artificial Sequence
  source: /note="Description of Artificial Sequence: Synthetic oligonucleotide"
  source: /note="Description of Combined DNA/RNA Molecule: Synthetic oligonucleotide"
  source: /note="DNA/RNA"
  source: /note="5' tri-ethylene glycol (TEG)"
  modified_base (1)..(1): bicyclic nucleic acid (BNA)
  modified_base (2)..(2): 5-methyl bicyclic nucleic acid
  modified_base (5)..(5): 5-methyl modified nucleotide
  modified_base (17)..(17): 5-methyl modified nucleotide
  modified_base (20)..(20): bicyclic nucleic acid (BNA)
  modified_base (21)..(21): bicyclic nucleic acid (BNA)
  source: /note="3' tri-ethylene glycol (TEG)"
acaucaaggaagauggcautt

SEQ ID NO: 22139 - DNA, 20 bp, Artificial Sequence
  source: /note="Description of Artificial Sequence: Synthetic oligonucleotide"
  source: /note="Description of Combined DNA/RNA Molecule: Synthetic oligonucleotide"
  source: /note="DNA/RNA"
  source: /note="5' tri-ethylene glycol (TEG)"
  modified_base (1)..(1): bicyclic nucleic acid (BNA)
  modified_base (2)..(2): 5-methyl bicyclic nucleic acid
  modified_base (5)..(5): 5-methyl modified nucleotide
  modified_base (17)..(17): 5-methyl modified nucleotide
  modified_base (19)..(19): bicyclic nucleic acid (BNA)
  modified_base (20)..(20): bicyclic nucleic acid (BNA)
  source: /note="3' tri-ethylene glycol (TEG)"
acaucaaggaagauggcatt

SEQ ID NO: 22140 - DNA, 19 bp, Artificial Sequence
  source: /note="Description of Artificial Sequence: Synthetic oligonucleotide"
  source: /note="Description of Combined DNA/RNA Molecule: Synthetic oligonucleotide"
  source: /note="DNA/RNA"
  source: /note="5' tri-ethylene glycol (TEG)"
  modified_base (1)..(1): bicyclic nucleic acid (BNA)
  modified_base (2)..(2): 5-methyl bicyclic nucleic acid
  modified_base (5)..(5): 5-methyl modified nucleotide
  modified_base (17)..(17): 5-methyl modified nucleotide
  modified_base (18)..(18): bicyclic nucleic acid (BNA)
  modified_base (19)..(19): bicyclic nucleic acid (BNA)
  source: /note="3' tri-ethylene glycol (TEG)"
acaucaaggaagauggcat

SEQ ID NO: 22141 - RNA, 18 nt, Artificial Sequence
  source: /note="Description of Artificial Sequence: Synthetic oligonucleotide"
  source: /note="RNA"
  source: /note="5' tri-ethylene glycol (TEG)"
  modified_base (1)..(1): bicyclic nucleic acid (BNA)
  modified_base (2)..(2): 5-methyl bicyclic nucleic acid
  modified_base (5)..(5): 5-methyl modified nucleotide
  modified_base (17)..(17): 5-methyl bicyclic nucleic acid
  modified_base (18)..(18): bicyclic nucleic acid (BNA)
  source: /note="3' tri-ethylene glycol (TEG)"
acaucaaggaagauggca

SEQ ID NO: 22142 - RNA, 17 nt, Artificial Sequence
  source: /note="Description of Artificial Sequence: Synthetic oligonucleotide"
  source: /note="RNA"
  source: /note="5' tri-ethylene glycol (TEG)"
  modified_base (1)..(1): bicyclic nucleic acid (BNA)
  modified_base (2)..(2): 5-methyl bicyclic nucleic acid
  modified_base (5)..(5): 5-methyl modified nucleotide
  modified_base (16)..(16): bicyclic nucleic acid (BNA)
  modified_base (17)..(17): 5-methyl bicyclic nucleic acid
  source: /note="3' tri-ethylene glycol (TEG)"
acaucaaggaagauggc

SEQ ID NO: 22143 - RNA, 16 nt, Artificial Sequence
  source: /note="Description of Artificial Sequence: Synthetic oligonucleotide"
  source: /note="RNA"
  source: /note="5' tri-ethylene glycol (TEG)"
  modified_base (1)..(1): bicyclic nucleic acid (BNA)
  modified_base (2)..(2): 5-methyl bicyclic nucleic acid
  modified_base (5)..(5): 5-methyl modified nucleotide
  modified_base (15)..(15): bicyclic nucleic acid (BNA)
  modified_base (16)..(16): bicyclic nucleic acid (BNA)
  source: /note="3' tri-ethylene glycol (TEG)"
acaucaaggaagaugg

SEQ ID NO: 22144 - DNA, 15 bp, Artificial Sequence
  source: /note="Description of Artificial Sequence: Synthetic oligonucleotide"
  source: /note="Description of Combined DNA/RNA Molecule: Synthetic oligonucleotide"
  source: /note="DNA/RNA"
  source: /note="5' tri-ethylene glycol (TEG)"
  modified_base (1)..(1): bicyclic nucleic acid (BNA)
  modified_base (2)..(2): 5-methyl bicyclic nucleic acid
  modified_base (5)..(5): 5-methyl modified nucleotide
  modified_base (14)..(14): bicyclic nucleic acid (BNA)
  modified_base (15)..(15): bicyclic nucleic acid (BNA)
  source: /note="3' tri-ethylene glycol (TEG)"
acaucaaggaagatg

SEQ ID NO: 22145 - DNA, 14 bp, Artificial Sequence
  source: /note="Description of Artificial Sequence: Synthetic oligonucleotide"
  source: /note="Description of Combined DNA/RNA Molecule: Synthetic oligonucleotide"
  source: /note="DNA/RNA"
  source: /note="5' tri-ethylene glycol (TEG)"
  modified_base (1)..(1): bicyclic nucleic acid (BNA)
  modified_base (2)..(2): 5-methyl bicyclic nucleic acid
  modified_base (5)..(5): 5-methyl modified nucleotide
  modified_base (13)..(13): bicyclic nucleic acid (BNA)
  modified_base (14)..(14): bicyclic nucleic acid (BNA)
  source: /note="3' tri-ethylene glycol (TEG)"
acaucaaggaagat

SEQ ID NO: 22146 - RNA, 13 nt, Artificial Sequence
  source: /note="Description of Artificial Sequence: Synthetic oligonucleotide"
  source: /note="RNA"
  source: /note="5' tri-ethylene glycol (TEG)"
  modified_base (1)..(1): bicyclic nucleic acid (BNA)
  modified_base (2)..(2): 5-methyl bicyclic nucleic acid
  modified_base (5)..(5): 5-methyl modified nucleotide
  modified_base (12)..(12): bicyclic nucleic acid (BNA)
  modified_base (13)..(13): bicyclic nucleic acid (BNA)
  source: /note="3' tri-ethylene glycol (TEG)"
acaucaaggaaga

SEQ ID NO: 22147 - RNA, 12 nt, Artificial Sequence
  source: /note="Description of Artificial Sequence: Synthetic oligonucleotide"
  source: /note="RNA"
  source: /note="5' tri-ethylene glycol (TEG)"
  modified_base (1)..(1): bicyclic nucleic acid (BNA)
  modified_base (2)..(2): 5-methyl bicyclic nucleic acid
  modified_base (5)..(5): 5-methyl modified nucleotide
  modified_base (11)..(11): bicyclic nucleic acid (BNA)
  modified_base (12)..(12): bicyclic nucleic acid (BNA)
  source: /note="3' tri-ethylene glycol (TEG)"
acaucaaggaag

SEQ ID NO: 22148 - RNA, 24 nt, Artificial Sequence
  source: /note="Description of Artificial Sequence: Synthetic oligonucleotide"
  source: /note="RNA"
  source: /note="5' tri-ethylene glycol (TEG)"
  modified_base (1)..(1): 5-methyl bicyclic nucleic acid
  modified_base (2)..(2): bicyclic nucleic acid (BNA)
  modified_base (4)..(4): 5-methyl modified nucleotide
  modified_base (16)..(16): 5-methyl modified nucleotide
  modified_base (21)..(21): 5-methyl modified nucleotide
  modified_base (23)..(23): bicyclic nucleic acid (BNA)
  modified_base (24)..(24): bicyclic nucleic acid (BNA)
  source: /note="3' tri-ethylene glycol (TEG)"
caucaaggaagauggcauuucuag

SEQ ID NO: 22149 - DNA, 23 bp, Artificial Sequence
  source: /note="Description of Artificial Sequence: Synthetic oligonucleotide"
  source: /note="Description of Combined DNA/RNA Molecule: Synthetic oligonucleotide"
  source: /note="DNA/RNA"
  source: /note="5' tri-ethylene glycol (TEG)"
  modified_base (1)..(1): 5-methyl bicyclic nucleic acid
  modified_base (2)..(2): bicyclic nucleic acid (BNA)
  modified_base (4)..(4): 5-methyl modified nucleotide
  modified_base (16)..(16): 5-methyl modified nucleotide
  modified_base (21)..(21): 5-methyl modified nucleotide
  modified_base (22)..(22): bicyclic nucleic acid (BNA)
  modified_base (23)..(23): bicyclic nucleic acid (BNA)
  source: /note="3' tri-ethylene glycol (TEG)"
caucaaggaagauggcauuucta

SEQ ID NO: 22150 - DNA, 22 bp, Artificial Sequence
  source: /note="Description of Artificial Sequence: Synthetic oligonucleotide"
  source: /note="Description of Combined DNA/RNA Molecule: Synthetic oligonucleotide"
  source: /note="DNA/RNA"
  source: /note="5' tri-ethylene glycol (TEG)"
  modified_base (1)..(1): 5-methyl bicyclic nucleic acid
  modified_base (2)..(2): bicyclic nucleic acid (BNA)
  modified_base (4)..(4): 5-methyl modified nucleotide
  modified_base (16)..(16): 5-methyl modified nucleotide
  modified_base (21)..(21): 5-methyl bicyclic nucleic acid
  modified_base (22)..(22): bicyclic nucleic acid (BNA)
  source: /note="3' tri-ethylene glycol (TEG)"
caucaaggaagauggcauuuct

SEQ ID NO: 22151 - DNA, 21 bp, Artificial Sequence
  source: /note="Description of Artificial Sequence: Synthetic oligonucleotide"
  source: /note="Description of Combined DNA/RNA Molecule: Synthetic oligonucleotide"
  source: /note="DNA/RNA"
  source: /note="5' tri-ethylene glycol (TEG)"
  modified_base (1)..(1): 5-methyl bicyclic nucleic acid
  modified_base (2)..(2): bicyclic nucleic acid (BNA)
  modified_base (4)..(4): 5-methyl modified nucleotide
  modified_base (16)..(16): 5-methyl modified nucleotide
  modified_base (20)..(20): bicyclic nucleic acid (BNA)
  modified_base (21)..(21): 5-methyl bicyclic nucleic acid
  source: /note="3' tri-ethylene glycol (TEG)"
caucaaggaagauggcauutc

SEQ ID NO: 22152 - DNA, 20 bp, Artificial Sequence
  source: /note="Description of Artificial Sequence: Synthetic oligonucleotide"
  source: /note="Description of Combined DNA/RNA Molecule: Synthetic oligonucleotide"
  source: /note="DNA/RNA"
  source: /note="5' tri-ethylene glycol (TEG)"
  modified_base (1)..(1): 5-methyl bicyclic nucleic acid
  modified_base (2)..(2): bicyclic nucleic acid (BNA)
  modified_base (4)..(4): 5-methyl modified nucleotide
  modified_base (16)..(16): 5-methyl modified nucleotide
  modified_base (19)..(19): bicyclic nucleic acid (BNA)
  modified_base (20)..(20): bicyclic nucleic acid (BNA)
  source: /note="3' tri-ethylene glycol (TEG)"
caucaaggaagauggcautt

SEQ ID NO: 22153 - DNA, 19 bp, Artificial Sequence
  source: /note="Description of Artificial Sequence: Synthetic oligonucleotide"
  source: /note="Description of Combined DNA/RNA Molecule: Synthetic oligonucleotide"
  source: /note="DNA/RNA"
  source: /note="5' tri-ethylene glycol (TEG)"
  modified_base (1)..(1): 5-methyl bicyclic nucleic acid
  modified_base (2)..(2): bicyclic nucleic acid (BNA)
  modified_base (4)..(4): 5-methyl modified nucleotide
  modified_base (16)..(16): 5-methyl modified nucleotide
  modified_base (18)..(18): bicyclic nucleic acid (BNA)
  modified_base (19)..(19): bicyclic nucleic acid (BNA)
  source: /note="3' tri-ethylene glycol (TEG)"
caucaaggaagauggcatt

SEQ ID NO: 22154 - DNA, 18 bp, Artificial Sequence
  source: /note="Description of Artificial Sequence: Synthetic oligonucleotide"
  source: /note="Description of Combined DNA/RNA Molecule: Synthetic oligonucleotide"
  source: /note="DNA/RNA"
  source: /note="5' tri-ethylene glycol (TEG)"
  modified_base (1)..(1): 5-methyl bicyclic nucleic acid
  modified_base (2)..(2): bicyclic nucleic acid (BNA)
  modified_base (4)..(4): 5-methyl modified nucleotide
  modified_base (16)..(16): 5-methyl modified nucleotide
  modified_base (17)..(17): bicyclic nucleic acid (BNA)
  modified_base (18)..(18): bicyclic nucleic acid (BNA)
  source: /note="3' tri-ethylene glycol (TEG)"
caucaaggaagauggcat

SEQ ID NO: 22155 - RNA, 17 nt, Artificial Sequence
  source: /note="Description of Artificial Sequence: Synthetic oligonucleotide"
  source: /note="RNA"
  source: /note="5' tri-ethylene glycol (TEG)"
  modified_base (1)..(1): 5-methyl bicyclic nucleic acid
  modified_base (2)..(2): bicyclic nucleic acid (BNA)
  modified_base (4)..(4): 5-methyl modified nucleotide
  modified_base (16)..(16): 5-methyl bicyclic nucleic acid
  modified_base (17)..(17): bicyclic nucleic acid (BNA)
  source: /note="3' tri-ethylene glycol (TEG)"
caucaaggaagauggca

SEQ ID NO: 22156 - RNA, 16 nt, Artificial Sequence
  source: /note="Description of Artificial Sequence: Synthetic oligonucleotide"
  source: /note="RNA"
  source: /note="5' tri-ethylene glycol (TEG)"
  modified_base (1)..(1): 5-methyl bicyclic nucleic acid
  modified_base (2)..(2): bicyclic nucleic acid (BNA)
  modified_base (4)..(4): 5-methyl modified nucleotide
  modified_base (15)..(15): bicyclic nucleic acid (BNA)
  modified_base (16)..(16): 5-methyl bicyclic nucleic acid
  source: /note="3' tri-ethylene glycol (TEG)"
caucaaggaagauggc

SEQ ID NO: 22157 - RNA, 15 nt, Artificial Sequence
  source: /note="Description of Artificial Sequence: Synthetic oligonucleotide"
  source: /note="RNA"
  source: /note="5' tri-ethylene glycol (TEG)"
  modified_base (1)..(1): 5-methyl bicyclic nucleic acid
  modified_base (2)..(2): bicyclic nucleic acid (BNA)
  modified_base (4)..(4): 5-methyl modified nucleotide
  modified_base (14)..(14): bicyclic nucleic acid (BNA)
  modified_base (15)..(15): bicyclic nucleic acid (BNA)
  source: /note="3' tri-ethylene glycol (TEG)"
caucaaggaagaugg

SEQ ID NO: 22158 - DNA, 14 bp, Artificial Sequence
  source: /note="Description of Artificial Sequence: Synthetic oligonucleotide"
  source: /note="Description of Combined DNA/RNA Molecule: Synthetic oligonucleotide"
  source: /note="DNA/RNA"
  source: /note="5' tri-ethylene glycol (TEG)"
  modified_base (1)..(1): 5-methyl bicyclic nucleic acid
  modified_base (2)..(2): bicyclic nucleic acid (BNA)
  modified_base (4)..(4): 5-methyl modified nucleotide
  modified_base (13)..(13): bicyclic nucleic acid (BNA)
  modified_base (14)..(14): bicyclic nucleic acid (BNA)
  source: /note="3' tri-ethylene glycol (TEG)"
caucaaggaagatg

SEQ ID NO: 22159 - DNA, 13 bp, Artificial Sequence
  source: /note="Description of Artificial Sequence: Synthetic oligonucleotide"
  source: /note="Description of Combined DNA/RNA Molecule: Synthetic oligonucleotide"
  source: /note="DNA/RNA"
  source: /note="5' tri-ethylene glycol (TEG)"
  modified_base (1)..(1): 5-methyl bicyclic nucleic acid
  modified_base (2)..(2): bicyclic nucleic acid (BNA)
  modified_base (4)..(4): 5-methyl modified nucleotide
  modified_base (12)..(12): bicyclic nucleic acid (BNA)
  modified_base (13)..(13): bicyclic nucleic acid (BNA)
  source: /note="3' tri-ethylene glycol (TEG)"
caucaaggaagat

SEQ ID NO: 22160 - RNA, 12 nt, Artificial Sequence
  source: /note="Description of Artificial Sequence: Synthetic oligonucleotide"
  source: /note="RNA"
  source: /note="5' tri-ethylene glycol (TEG)"
  modified_base (1)..(1): 5-methyl bicyclic nucleic acid
  modified_base (2)..(2): bicyclic nucleic acid (BNA)
  modified_base (4)..(4): 5-methyl modified nucleotide
  modified_base (11)..(11): bicyclic nucleic acid (BNA)
  modified_base (12)..(12): bicyclic nucleic acid (BNA)
  source: /note="3' tri-ethylene glycol (TEG)"
caucaaggaaga

SEQ ID NO: 22161 - RNA, 11 nt, Artificial Sequence
  source: /note="Description of Artificial Sequence: Synthetic oligonucleotide"
  source: /note="RNA"
  source: /note="5' tri-ethylene glycol (TEG)"
  modified_base (1)..(1): 5-methyl bicyclic nucleic acid
  modified_base (2)..(2): bicyclic nucleic acid (BNA)
  modified_base (4)..(4): 5-methyl modified nucleotide
  modified_base (10)..(10): bicyclic nucleic acid (BNA)
  modified_base (11)..(11): bicyclic nucleic acid (BNA)
  source: /note="3' tri-ethylene glycol (TEG)"
caucaaggaag

SEQ ID NO: 22162 - DNA, 23 bp, Artificial Sequence
  source: /note="Description of Artificial Sequence: Synthetic oligonucleotide"
  source: /note="Description of Combined DNA/RNA Molecule: Synthetic oligonucleotide"
  source: /note="DNA/RNA"
  source: /note="5' tri-ethylene glycol (TEG)"
  modified_base (1)..(1): bicyclic nucleic acid (BNA)
  modified_base (2)..(2): bicyclic nucleic acid (BNA)
  modified_base (3)..(3): 5-methyl modified nucleotide
  modified_base (15)..(15): 5-methyl modified nucleotide
  modified_base (20)..(20): 5-methyl modified nucleotide
  modified_base (22)..(22): bicyclic nucleic acid (BNA)
  modified_base (23)..(23): bicyclic nucleic acid (BNA)
  source: /note="3' tri-ethylene glycol (TEG)"
atcaaggaagauggcauuucuag

SEQ ID NO: 22163 - DNA, 22 bp, Artificial Sequence
  source: /note="Description of Artificial Sequence: Synthetic oligonucleotide"
  source: /note="Description of Combined DNA/RNA Molecule: Synthetic oligonucleotide"
  source: /note="DNA/RNA"
  source: /note="5' tri-ethylene glycol (TEG)"
  modified_base (1)..(1): bicyclic nucleic acid (BNA)
  modified_base (2)..(2): bicyclic nucleic acid (BNA)
  modified_base (3)..(3): 5-methyl modified nucleotide
  modified_base (15)..(15): 5-methyl modified nucleotide
  modified_base (20)..(20): 5-methyl modified nucleotide
  modified_base (21)..(21): bicyclic nucleic acid (BNA)
  modified_base (22)..(22): bicyclic nucleic acid (BNA)
  source: /note="3' tri-ethylene glycol (TEG)"
atcaaggaagauggcauuucta

SEQ ID NO: 22164 - DNA, 21 bp, Artificial Sequence
  source: /note="Description of Artificial Sequence: Synthetic oligonucleotide"
  source: /note="Description of Combined DNA/RNA Molecule: Synthetic oligonucleotide"
  source: /note="DNA/RNA"
  source: /note="5' tri-ethylene glycol (TEG)"
  modified_base (1)..(1): bicyclic nucleic acid (BNA)
  modified_base (2)..(2): bicyclic nucleic acid (BNA)
  modified_base (3)..(3): 5-methyl modified nucleotide
  modified_base (15)..(15): 5-methyl modified nucleotide
  modified_base (20)..(20): 5-methyl bicyclic nucleic acid
  modified_base (21)..(21): bicyclic nucleic acid (BNA)
  source: /note="3' tri-ethylene glycol (TEG)"
atcaaggaagauggcauuuct

SEQ ID NO: 22165 - DNA, 20 bp, Artificial Sequence
  source: /note="Description of Artificial Sequence: Synthetic oligonucleotide"
  source: /note="Description of Combined DNA/RNA Molecule: Synthetic oligonucleotide"
  source: /note="DNA/RNA"
  source: /note="5' tri-ethylene glycol (TEG)"
  modified_base (1)..(1): bicyclic nucleic acid (BNA)
  modified_base (2)..(2): bicyclic nucleic acid (BNA)
  modified_base (3)..(3): 5-methyl modified nucleotide
  modified_base (15)..(15): 5-methyl modified nucleotide
  modified_base (19)..(19): bicyclic nucleic acid (BNA)
  modified_base (20)..(20): 5-methyl bicyclic nucleic acid
  source: /note="3' tri-ethylene glycol (TEG)"
atcaaggaagauggcauutc

SEQ ID NO: 22166 - DNA, 19 bp, Artificial Sequence
  source: /note="Description of Artificial Sequence: Synthetic oligonucleotide"
  source: /note="Description of Combined DNA/RNA Molecule: Synthetic oligonucleotide"
  source: /note="DNA/RNA"
  source: /note="5' tri-ethylene glycol (TEG)"
  modified_base (1)..(1): bicyclic nucleic acid (BNA)
  modified_base (2)..(2): bicyclic nucleic acid (BNA)
  modified_base (3)..(3): 5-methyl modified nucleotide
  modified_base (15)..(15): 5-methyl modified nucleotide
  modified_base (18)..(18): bicyclic nucleic acid (BNA)
  modified_base (19)..(19): bicyclic nucleic acid (BNA)
  source: /note="3' tri-ethylene glycol (TEG)"
atcaaggaagauggcautt

SEQ ID NO: 22167 - DNA, 18 bp, Artificial Sequence
  source: /note="Description of Artificial Sequence: Synthetic oligonucleotide"
  source: /note="Description of Combined DNA/RNA Molecule: Synthetic oligonucleotide"
  source: /note="DNA/RNA"
  source: /note="5' tri-ethylene glycol (TEG)"
  modified_base (1)..(1): bicyclic nucleic acid (BNA)
  modified_base (2)..(2): bicyclic nucleic acid (BNA)
  modified_base (3)..(3): 5-methyl modified nucleotide
  modified_base (15)..(15): 5-methyl modified nucleotide
  modified_base (17)..(17): bicyclic nucleic acid (BNA)
  modified_base (18)..(18): bicyclic nucleic acid (BNA)
  source: /note="3' tri-ethylene glycol (TEG)"
atcaaggaagauggcatt

SEQ ID NO: 22168 - DNA, 17 bp, Artificial Sequence
  source: /note="Description of Artificial Sequence: Synthetic oligonucleotide"
  source: /note="Description of Combined DNA/RNA Molecule: Synthetic oligonucleotide"
  source: /note="DNA/RNA"
  source: /note="5' tri-ethylene glycol (TEG)"
  modified_base (1)..(1): bicyclic nucleic acid (BNA)
  modified_base (2)..(2): bicyclic nucleic acid (BNA)
  modified_base (3)..(3): 5-methyl modified nucleotide
  modified_base (15)..(15): 5-methyl modified nucleotide
  modified_base (16)..(16): bicyclic nucleic acid (BNA)
  modified_base (17)..(17): bicyclic nucleic acid (BNA)
  source: /note="3' tri-ethylene glycol (TEG)"
atcaaggaagauggcat

SEQ ID NO: 22169 - DNA, 16 bp, Artificial Sequence
  source: /note="Description of Artificial Sequence: Synthetic oligonucleotide"
  source: /note="Description of Combined DNA/RNA Molecule: Synthetic oligonucleotide"
  source: /note="DNA/RNA"
  source: /note="5' tri-ethylene glycol (TEG)"
  modified_base (1)..(1): bicyclic nucleic acid (BNA)
  modified_base (2)..(2): bicyclic nucleic acid (BNA)
  modified_base (3)..(3): 5-methyl modified nucleotide
  modified_base (15)..(15): 5-methyl bicyclic nucleic acid
  modified_base (16)..(16): bicyclic nucleic acid (BNA)
  source: /note="3' tri-ethylene glycol (TEG)"
atcaaggaagauggca

SEQ ID NO: 22170 - DNA, 15 bp, Artificial Sequence
  source: /note="Description of Artificial Sequence: Synthetic oligonucleotide"
  source: /note="Description of Combined DNA/RNA Molecule: Synthetic oligonucleotide"
  source: /note="DNA/RNA"
  source: /note="5' tri-ethylene glycol (TEG)"
  modified_base (1)..(1): bicyclic nucleic acid (BNA)
  modified_base (2)..(2): bicyclic nucleic acid (BNA)
  modified_base (3)..(3): 5-methyl modified nucleotide
  modified_base (14)..(14): bicyclic nucleic acid (BNA)
  modified_base (15)..(15): 5-methyl bicyclic nucleic acid
  source: /note="3' tri-ethylene glycol (TEG)"
atcaaggaagauggc

SEQ ID NO: 22171 - DNA, 14 bp, Artificial Sequence
  source: /note="Description of Artificial Sequence: Synthetic oligonucleotide"
  source: /note="Description of Combined DNA/RNA Molecule: Synthetic oligonucleotide"
  source: /note="DNA/RNA"
  source: /note="5' tri-ethylene glycol (TEG)"
  modified_base (1)..(1): bicyclic nucleic acid (BNA)
  modified_base (2)..(2): bicyclic nucleic acid (BNA)
  modified_base (3)..(3): 5-methyl modified nucleotide
  modified_base (13)..(13): bicyclic nucleic acid (BNA)
  modified_base (14)..(14): bicyclic nucleic acid (BNA)
  source: /note="3' tri-ethylene glycol (TEG)"
atcaaggaagaugg

SEQ ID NO: 22172 - DNA, 13 bp, Artificial Sequence
  source: /note="Description of Artificial Sequence: Synthetic oligonucleotide"
  source: /note="DNA/RNA"
  source: /note="5' tri-ethylene glycol (TEG)"
  modified_base (1)..(1): bicyclic nucleic acid (BNA)
  modified_base (2)..(2): bicyclic nucleic acid (BNA)
  modified_base (3)..(3): 5-methyl modified nucleotide
  modified_base (12)..(12): bicyclic nucleic acid (BNA)
  modified_base (13)..(13): bicyclic nucleic acid (BNA)
  source: /note="3' tri-ethylene glycol (TEG)"
atcaaggaagatg

SEQ ID NO: 22173 - DNA, 12 bp, Artificial Sequence
  source: /note="Description of Artificial Sequence: Synthetic oligonucleotide"
  source: /note="DNA/RNA"
  source: /note="5' tri-ethylene glycol (TEG)"
  modified_base (1)..(1): bicyclic nucleic acid (BNA)
  modified_base (2)..(2): bicyclic nucleic acid (BNA)
  modified_base (3)..(3): 5-methyl modified nucleotide
  modified_base (11)..(11): bicyclic nucleic acid (BNA)
  modified_base (12)..(12): bicyclic nucleic acid (BNA)
  source: /note="3' tri-ethylene glycol (TEG)"
atcaaggaagat

SEQ ID NO: 22174 - DNA, 11 bp, Artificial Sequence
  source: /note="Description of Artificial Sequence: Synthetic oligonucleotide"
  source: /note="DNA/RNA"
  source: /note="5' tri-ethylene glycol (TEG)"
  modified_base (1)..(1): bicyclic nucleic acid (BNA)
  modified_base (2)..(2): bicyclic nucleic acid (BNA)
  modified_base (3)..(3): 5-methyl modified nucleotide
  modified_base (10)..(10): bicyclic nucleic acid (BNA)
  modified_base (11)..(11): bicyclic nucleic acid (BNA)
  source: /note="3' tri-ethylene glycol (TEG)"
atcaaggaaga

SEQ ID NO: 22175 - DNA, 10 bp, Artificial Sequence
  source: /note="Description of Artificial Sequence: Synthetic oligonucleotide"
  source: /note="DNA/RNA"
  source: /note="5' tri-ethylene glycol (TEG)"
  modified_base (1)..(1): bicyclic nucleic acid (BNA)
  modified_base (2)..(2): bicyclic nucleic acid (BNA)
  modified_base (3)..(3): 5-methyl modified nucleotide
  modified_base (9)..(9): bicyclic nucleic acid (BNA)
  modified_base (10)..(10): bicyclic nucleic acid (BNA)
  source: /note="3' tri-ethylene glycol (TEG)"
atcaaggaag

SEQ ID NO: 22176 - DNA, 23 bp, Artificial Sequence
  source: /note="Description of Artificial Sequence: Synthetic oligonucleotide"
  source: /note="Description of Combined DNA/RNA Molecule: Synthetic oligonucleotide"
  source: /note="DNA/RNA"
  source: /note="5' tri-ethylene glycol (TEG)"
  modified_base (1)..(1): 5-methyl bicyclic nucleic acid
  modified_base (2)..(2): 5-methyl bicyclic nucleic acid
  modified_base (7)..(7): 5-methyl modified nucleotide
  modified_base (13)..(13): 5-methyl modified nucleotide
  modified_base (14)..(14): 5-methyl modified nucleotide
  modified_base (16)..(16): 5-methyl modified nucleotide
  modified_base (17)..(17): 5-methyl modified nucleotide
  modified_base (20)..(20): 5-methyl modified nucleotide
  modified_base (22)..(22): bicyclic nucleic acid (BNA)
  modified_base (23)..(23): 5-methyl bicyclic nucleic acid
  source: /note="3' tri-ethylene glycol (TEG)"
ccagagcagguaccuccaacatc

SEQ ID NO: 22177 - RNA, 18 nt, Artificial Sequence
  source: /note="Description of Artificial Sequence: Synthetic oligonucleotide"
  source: /note="RNA"
  source: /note="5' tri-ethylene glycol (TEG)"
  modified_base (1)..(1): 5-methyl bicyclic nucleic acid
  modified_base (2)..(2): 5-methyl bicyclic nucleic acid
  modified_base (7)..(7): 5-methyl modified nucleotide
  modified_base (13)..(13): 5-methyl modified nucleotide
  modified_base (14)..(14): 5-methyl modified nucleotide
  modified_base (16)..(16): 5-methyl modified nucleotide
  modified_base (17)..(17): 5-methyl bicyclic nucleic acid
  modified_base (18)..(18): bicyclic nucleic acid (BNA)
  source: /note="3' tri-ethylene glycol (TEG)"
ccagagcagguaccucca

SEQ ID NO: 22178 - DNA, 23 bp, Artificial Sequence
  source: /note="Description of Artificial Sequence: Synthetic oligonucleotide"
  source: /note="Description of Combined DNA/RNA Molecule: Synthetic oligonucleotide"
  source: /note="DNA/RNA"
  source: /note="5' tri-ethylene glycol (TEG)"
  modified_base (1)..(1): 5-methyl bicyclic nucleic acid
  modified_base (2)..(2): 5-methyl bicyclic nucleic acid
  modified_base (4)..(4): 5-methyl modified nucleotide
  modified_base (18)..(18): 5-methyl modified nucleotide
  modified_base (22)..(22): bicyclic nucleic acid (BNA)
  modified_base (23)..(23): bicyclic nucleic acid (BNA)
  source: /note="3' tri-ethylene glycol (TEG)"
ccucugugauuuuauaacuugat

SEQ ID NO: 22179 - DNA, 17 bp, Artificial Sequence
  source: /note="Description of Artificial Sequence: Synthetic oligonucleotide"
  source: /note="Description of Combined DNA/RNA Molecule: Synthetic oligonucleotide"
  source: /note="DNA/RNA"
  source: /note="5' tri-ethylene glycol (TEG)"
  modified_base (1)..(1): bicyclic nucleic acid (BNA)
  modified_base (2)..(2): 5-methyl bicyclic nucleic acid
  modified_base (4)..(4): 5-methyl modified nucleotide
  modified_base (5)..(5): 5-methyl modified nucleotide
  modified_base (6)..(6): 5-methyl modified nucleotide
  modified_base (8)..(8): 5-methyl modified nucleotide
  modified_base (9)..(9): 5-methyl modified nucleotide
  modified_base (12)..(12): 5-methyl modified nucleotide
  modified_base (14)..(14): 5-methyl modified nucleotide
  modified_base (15)..(15): 5-methyl modified nucleotide
  modified_base (16)..(16): 5-methyl bicyclic nucleic acid
  modified_base (17)..(17): bicyclic nucleic acid (BNA)
  source: /note="3' tri-ethylene glycol (TEG)"
tcacccaccaucaccct

SEQ ID NO: 22180 - DNA, 20 bp, Artificial Sequence
  source: /note="Description of Artificial Sequence: Synthetic oligonucleotide"
  source: /note="Description of Combined DNA/RNA Molecule: Synthetic oligonucleotide"
  source: /note="DNA/RNA"
  source: /note="5' tri-ethylene glycol (TEG)"
  modified_base (1)..(1): bicyclic nucleic acid (BNA)
  modified_base (2)..(2): bicyclic nucleic acid (BNA)
  modified_base (7)..(7): 5-methyl modified nucleotide
  modified_base (8)..(8): 5-methyl modified nucleotide
  modified_base (10)..(10): 5-methyl modified nucleotide
  modified_base (16)..(16): 5-methyl modified nucleotide
  modified_base (18)..(18): 5-methyl modified nucleotide
  modified_base (19)..(19): 5-methyl bicyclic nucleic acid
  modified_base (20)..(20): 5-methyl bicyclic nucleic acid
  source: /note="3' tri-ethylene glycol (TEG)"
tgauauccucaaggucaccc

SEQ ID NO: 22181 - DNA, 22 bp, Artificial Sequence
  source: /note="Description of Artificial Sequence: Synthetic oligonucleotide"
  source: /note="Description of Combined DNA/RNA Molecule: Synthetic oligonucleotide"
  source: /note="DNA/RNA"
  source: /note="5' tri-ethylene glycol (TEG)"
  modified_base (1)..(1): 5-methyl bicyclic nucleic acid
  modified_base (2)..(2): bicyclic nucleic acid (BNA)
  modified_base (4)..(4): 5-methyl modified nucleotide
  modified_base (13)..(13): 5-methyl modified nucleotide
  modified_base (16)..(16): 5-methyl modified nucleotide
  modified_base (18)..(18): 5-methyl modified nucleotide
  modified_base (21)..(21): bicyclic nucleic acid (BNA)
  modified_base (22)..(22): bicyclic nucleic acid (BNA)
  source: /note="3' tri-ethylene glycol (TEG)"
ctgcuugaugaucaucucgutg

SEQ ID NO: 22182 - DNA, 18 bp, Artificial Sequence
  source: /note="Description of Artificial Sequence: Synthetic oligonucleotide"
  source: /note="Description of Combined DNA/RNA Molecule: Synthetic oligonucleotide"
  source: /note="DNA/RNA"
  source: /note="5' tri-ethylene glycol (TEG)"
  modified_base (1)..(1): 5-methyl bicyclic nucleic acid
  modified_base (2)..(2): bicyclic nucleic acid (BNA)
  modified_base (4)..(4): 5-methyl modified nucleotide
  modified_base (13)..(13): 5-methyl modified nucleotide
  modified_base (16)..(16): 5-methyl modified nucleotide
  modified_base (17)..(17): bicyclic nucleic acid (BNA)
  modified_base (18)..(18): 5-methyl bicyclic nucleic acid
  source: /note="3' tri-ethylene glycol (TEG)"
ctgcuugaugaucauctc

SEQ ID NO: 22183 - DNA, 19 bp, Artificial Sequence
  source: /note="Description of Artificial Sequence: Synthetic oligonucleotide"
  source: /note="Description of Combined DNA/RNA Molecule: Synthetic oligonucleotide"
  source: /note="DNA/RNA"
  source: /note="5' tri-ethylene glycol (TEG)"
  modified_base (1)..(1): bicyclic nucleic acid (BNA)
  modified_base (2)..(2): bicyclic nucleic acid (BNA)
  modified_base (5)..(5): 5-methyl modified nucleotide
  modified_base (6)..(6): 5-methyl modified nucleotide
  modified_base (14)..(14): 5-methyl modified nucleotide
  modified_base (15)..(15): 5-methyl modified nucleotide
  modified_base (17)..(17): 5-methyl modified nucleotide
  modified_base (18)..(18): bicyclic nucleic acid (BNA)
  modified_base (19)..(19): bicyclic nucleic acid (BNA)
  source: /note="3' tri-ethylene glycol (TEG)"
gtuuccuuaguaaccacag

SEQ ID NO: 22184 - DNA, 17 bp, Artificial Sequence
  source: /note="Description of Artificial Sequence: Synthetic oligonucleotide"
  source: /note="Description of Combined DNA/RNA Molecule: Synthetic oligonucleotide"
  source: /note="DNA/RNA"
  source: /note="5' tri-ethylene glycol (TEG)"
  modified_base (1)..(1): bicyclic nucleic acid (BNA)
  modified_base (2)..(2): bicyclic nucleic acid (BNA)
  modified_base (5)..(5): 5-methyl modified nucleotide
  modified_base (6)..(6): 5-methyl modified nucleotide
  modified_base (14)..(14): 5-methyl modified nucleotide
  modified_base (15)..(15): 5-methyl modified nucleotide
  modified_base (16)..(16): bicyclic nucleic acid (BNA)
  modified_base (17)..(17): 5-methyl bicyclic nucleic acid
  source: /note="3' tri-ethylene glycol (TEG)"
gtuuccuuaguaaccac

SEQ ID NO: 22185 - RNA, 18 nt, Artificial Sequence
  source: /note="Description of Artificial Sequence: Synthetic oligonucleotide"
  source: /note="Antisense Oligonucleotide"
  modified_base (1)..(1): bicyclic nucleic acid (BNA)
  modified_base (2)..(2): bicyclic nucleic acid (BNA)
  modified_base (6)..(6): bicyclic nucleic acid (BNA)
  modified_base (18)..(18): bicyclic nucleic acid (BNA)
gguaaguucuguccaagc

SEQ ID NO: 22186 - RNA, 18 nt, Artificial Sequence
  source: /note="Description of Artificial Sequence: Synthetic oligonucleotide"
  source: /note="Antisense Oligonucleotide"
  modified_base (1)..(1): bicyclic nucleic acid (BNA)
  modified_base (18)..(18): bicyclic nucleic acid (BNA)
gguaaguucuguccaagc

SEQ ID NO: 22187 - DNA, 18 bp, Artificial Sequence
  source: /note="Description of Artificial Sequence: Synthetic oligonucleotide"
  source: /note="Description of Combined DNA/RNA Molecule: Synthetic oligonucleotide"
  source: /note="Antisense Oligonucleotide"
  modified_base (1)..(1): bicyclic nucleic acid (BNA)
  modified_base (2)..(2): bicyclic nucleic acid (BNA)
  modified_base (10)..(10): bicyclic nucleic acid (BNA)
  modified_base (18)..(18): bicyclic nucleic acid (BNA)
gguaaguuctguccaagc

SEQ ID NO: 22188 - RNA, 18 nt, Artificial Sequence
  source: /note="Description of Artificial Sequence: Synthetic oligonucleotide"
  source: /note="Antisense Oligonucleotide"
  modified_base (1)..(1): bicyclic nucleic acid (BNA)
  modified_base (2)..(2): bicyclic nucleic acid (BNA)
  modified_base (17)..(17): bicyclic nucleic acid (BNA)
  modified_base (18)..(18): bicyclic nucleic acid (BNA)
gguaaguucuguccaagc

SEQ ID NO: 22189 - RNA, 18 nt, Artificial Sequence
  source: /note="Description of Artificial Sequence: Synthetic oligonucleotide"
  source: /note="Antisense Oligonucleotide"
  modified_base (1)..(1): bicyclic nucleic acid (BNA)
  modified_base (2)..(2): bicyclic nucleic acid (BNA)
  modified_base (11)..(11): bicyclic nucleic acid (BNA)
  modified_base (18)..(18): bicyclic nucleic acid (BNA)
gguaaguucuguccaagc

SEQ ID NO: 22190 - RNA, 18 nt, Artificial Sequence
  source: /note="Description of Artificial Sequence: Synthetic oligonucleotide"
  source: /note="Antisense Oligonucleotide"
  modified_base (1)..(1): bicyclic nucleic acid (BNA)
  modified_base (2)..(2): bicyclic nucleic acid (BNA)
  modified_base (6)..(6): bicyclic nucleic acid (BNA)
  modified_base (11)..(11): bicyclic nucleic acid (BNA)
  modified_base (18)..(18): bicyclic nucleic acid (BNA)
gguaaguucuguccaagc

SEQ ID NO: 22191 - RNA, 18 nt, Artificial Sequence
  source: /note="Description of Artificial Sequence: Synthetic oligonucleotide"
  source: /note="Antisense Oligonucleotide"
  modified_base (1)..(1): bicyclic nucleic acid (BNA)
  modified_base (2)..(2): bicyclic nucleic acid (BNA)
  modified_base (6)..(6): bicyclic nucleic acid (BNA)
  modified_base (11)..(11): bicyclic nucleic acid (BNA)
  modified_base (17)..(17): bicyclic nucleic acid (BNA)
  modified_base (18)..(18): bicyclic nucleic acid (BNA)
gguaaguucuguccaagc

SEQ ID NO: 22192 - RNA, 18 nt, Artificial Sequence
  source: /note="Description of Artificial Sequence: Synthetic oligonucleotide"
  source: /note="Antisense Oligonucleotide"
  modified_base (1)..(1): bicyclic nucleic acid (BNA)
  modified_base (2)..(2): bicyclic nucleic acid (BNA)
  modified_base (18)..(18): bicyclic nucleic acid (BNA)
gguaaguucuguccaagc

SEQ ID NO: 22193 - RNA, 18 nt, Artificial Sequence
  source: /note="Description of Artificial Sequence: Synthetic oligonucleotide"
  source: /note="Antisense Oligonucleotide"
  modified_base (1)..(1): bicyclic nucleic acid (BNA)
  modified_base (6)..(6): bicyclic nucleic acid (BNA)
  modified_base (18)..(18): bicyclic nucleic acid (BNA)
gguaaguucuguccaagc

SEQ ID NO: 22194 - RNA, 18 nt, Artificial Sequence
  source: /note="Description of Artificial Sequence: Synthetic oligonucleotide"
  source: /note="Antisense Oligonucleotide"
  modified_base (1)..(1): bicyclic nucleic acid (BNA)
  modified_base (11)..(11): bicyclic nucleic acid (BNA)
  modified_base (18)..(18): bicyclic nucleic acid (BNA)
gguaaguucuguccaagc

SEQ ID NO: 22195 - RNA, 18 nt, Artificial Sequence
  source: /note="Description of Artificial Sequence: Synthetic oligonucleotide"
  source: /note="Antisense Oligonucleotide"
  modified_base (1)..(1): bicyclic nucleic acid (BNA)
  modified_base (9)..(9): bicyclic nucleic acid (BNA)
  modified_base (18)..(18): bicyclic nucleic acid (BNA)
gguaaguucuguccaagc

SEQ ID NO: 22196 - RNA, 18 nt, Artificial Sequence
  source: /note="Description of Artificial Sequence: Synthetic oligonucleotide"
  source: /note="Antisense Oligonucleotide"
  modified_base (1)..(1): bicyclic nucleic acid (BNA)
  modified_base (18)..(18): bicyclic nucleic acid (BNA)
gguaaguucuguccaagc

SEQ ID NO: 22197 - RNA, 18 nt, Artificial Sequence
  source: /note="Description of Artificial Sequence: Synthetic oligonucleotide"
  source: /note="Antisense Oligonucleotide"
  source: /note="5' tri-ethylene glycol (TEG)"
  modified_base (1)..(1): bicyclic nucleic acid (BNA)
  modified_base (2)..(2): bicyclic nucleic acid (BNA)
  modified_base (6)..(6): bicyclic nucleic acid (BNA)
  modified_base (18)..(18): bicyclic nucleic acid (BNA)
gguaaguucuguccaagc

SEQ ID NO: 22198 - RNA, 18 nt, Artificial Sequence
  source: /note="Description of Artificial Sequence: Synthetic oligonucleotide"
  source: /note="Antisense Oligonucleotide"
  source: /note="5' tri-ethylene glycol (TEG)"
  modified_base (1)..(1): bicyclic nucleic acid (BNA)
  modified_base (18)..(18): bicyclic nucleic acid (BNA)
gguaaguucuguccaagc

SEQ ID NO: 22199 - DNA, 18 bp, Artificial Sequence
  source: /note="Description of Artificial Sequence: Synthetic oligonucleotide"
  source: /note="Description of Combined DNA/RNA Molecule: Synthetic oligonucleotide"
  source: /note="Antisense Oligonucleotide"
  source: /note="5' tri-ethylene glycol (TEG)"
  modified_base (1)..(1): bicyclic nucleic acid (BNA)
  modified_base (2)..(2): bicyclic nucleic acid (BNA)
  modified_base (10)..(10): bicyclic nucleic acid (BNA)
  modified_base (18)..(18): bicyclic nucleic acid (BNA)
gguaaguuctguccaagc

SEQ ID NO: 22200 - RNA, 18 nt, Artificial Sequence
  source: /note="Description of Artificial Sequence: Synthetic oligonucleotide"
  source: /note="Antisense Oligonucleotide"
  source: /note="5' tri-ethylene glycol (TEG)"
  modified_base (1)..(1): bicyclic nucleic acid (BNA)
  modified_base (2)..(2): bicyclic nucleic acid (BNA)
  modified_base (17)..(17): bicyclic nucleic acid (BNA)
  modified_base (18)..(18): bicyclic nucleic acid (BNA)
gguaaguucuguccaagc

SEQ ID NO: 22201 - RNA, 18 nt, Artificial Sequence
  source: /note="Description of Artificial Sequence: Synthetic oligonucleotide"
  source: /note="Antisense Oligonucleotide"
  source: /note="5' tri-ethylene glycol (TEG)"
  modified_base (1)..(1): bicyclic nucleic acid (BNA)
  modified_base (2)..(2): bicyclic nucleic acid (BNA)
  modified_base (11)..(11): bicyclic nucleic acid (BNA)
  modified_base (18)..(18): bicyclic nucleic acid (BNA)
gguaaguucuguccaagc

SEQ ID NO: 22202 - RNA, 18 nt, Artificial Sequence
  source: /note="Description of Artificial Sequence: Synthetic oligonucleotide"
  source: /note="Antisense Oligonucleotide"
  source: /note="5' tri-ethylene glycol (TEG)"
  modified_base (1)..(1): bicyclic nucleic acid (BNA)
  modified_base (2)..(2): bicyclic nucleic acid (BNA)
  modified_base (6)..(6): bicyclic nucleic acid (BNA)
  modified_base (11)..(11): bicyclic nucleic acid (BNA)
  modified_base (18)..(18): bicyclic nucleic acid (BNA)
gguaaguucuguccaagc

SEQ ID NO: 22203 - RNA, 18 nt, Artificial Sequence
  source: /note="Description of Artificial Sequence: Synthetic oligonucleotide"
  source: /note="Antisense Oligonucleotide"
  source: /note="5' tri-ethylene glycol (TEG)"
  modified_base (1)..(1): bicyclic nucleic acid (BNA)
  modified_base (2)..(2): bicyclic nucleic acid (BNA)
  modified_base (6)..(6): bicyclic nucleic acid (BNA)
  modified_base (11)..(11): bicyclic nucleic acid (BNA)
  modified_base (17)..(17): bicyclic nucleic acid (BNA)
  modified_base (18)..(18): bicyclic nucleic acid (BNA)
gguaaguucuguccaagc

SEQ ID NO: 22204 - RNA, 18 nt, Artificial Sequence
  source: /note="Description of Artificial Sequence: Synthetic oligonucleotide"
  source: /note="Antisense Oligonucleotide"
  source: /note="5' tri-ethylene glycol (TEG)"
  modified_base (1)..(1): bicyclic nucleic acid (BNA)
  modified_base (2)..(2): bicyclic nucleic acid (BNA)
  modified_base (18)..(18): bicyclic nucleic acid (BNA)
gguaaguucuguccaagc

SEQ ID NO: 22205 - RNA, 18 nt, Artificial Sequence
  source: /note="Description of Artificial Sequence: Synthetic oligonucleotide"
  source: /note="Antisense Oligonucleotide"
  source: /note="5' tri-ethylene glycol (TEG)"
  modified_base (1)..(1): bicyclic nucleic acid (BNA)
  modified_base (6)..(6): bicyclic nucleic acid (BNA)
  modified_base (18)..(18): bicyclic nucleic acid (BNA)
gguaaguucuguccaagc

SEQ ID NO: 22206 - RNA, 18 nt, Artificial Sequence
  source: /note="Description of Artificial Sequence: Synthetic oligonucleotide"
  source: /note="Antisense Oligonucleotide"
  source: /note="5' tri-ethylene glycol (TEG)"
  modified_base (1)..(1): bicyclic nucleic acid (BNA)
  modified_base (11)..(11): bicyclic nucleic acid (BNA)
  modified_base (18)..(18): bicyclic nucleic acid (BNA)
gguaaguucuguccaagc

SEQ ID NO: 22207 - RNA, 18 nt, Artificial Sequence
  source: /note="Description of Artificial Sequence: Synthetic oligonucleotide"
  source: /note="Antisense Oligonucleotide"
  source: /note="5' tri-ethylene glycol (TEG)"
  modified_base (1)..(1): bicyclic nucleic acid (BNA)
  modified_base (9)..(9): bicyclic nucleic acid (BNA)
  modified_base (18)..(18): bicyclic nucleic acid (BNA)
gguaaguucuguccaagc

SEQ ID NO: 22208 - RNA, 18 nt, Artificial Sequence
  source: /note="Description of Artificial Sequence: Synthetic oligonucleotide"
  source: /note="Antisense Oligonucleotide"
  source: /note="5' tri-ethylene glycol (TEG)"
  modified_base (1)..(1): bicyclic nucleic acid (BNA)
  modified_base (18)..(18): bicyclic nucleic acid (BNA)
gguaaguucuguccaagc

SEQ ID NO: 22209 - RNA, 18 nt, Artificial Sequence
  source: /note="Description of Artificial Sequence: Synthetic oligonucleotide"
  source: /note="Antisense Oligonucleotide"
  modified_base (1)..(1): bicyclic nucleic acid (BNA)
  modified_base (2)..(2): bicyclic nucleic acid (BNA)
  modified_base (6)..(6): bicyclic nucleic acid (BNA)
  modified_base (18)..(18): bicyclic nucleic acid (BNA)
  source: /note="3' tri-ethylene glycol (TEG)"
gguaaguucuguccaagc

SEQ ID NO: 22210 - RNA, 18 nt, Artificial Sequence
  source: /note="Description of Artificial Sequence: Synthetic oligonucleotide"
  source: /note="Antisense Oligonucleotide"
  modified_base (1)..(1): bicyclic nucleic acid (BNA)
  modified_base (18)..(18): bicyclic nucleic acid (BNA)
  source: /note="3' tri-ethylene glycol (TEG)"
gguaaguucuguccaagc

SEQ ID NO: 22211 - DNA, 18 bp, Artificial Sequence
  source: /note="Description of Artificial Sequence: Synthetic oligonucleotide"
  source: /note="Description of Combined DNA/RNA Molecule: Synthetic oligonucleotide"
  source: /note="Antisense Oligonucleotide"
  modified_base (1)..(1): bicyclic nucleic acid (BNA)
  modified_base (2)..(2): bicyclic nucleic acid (BNA)
  modified_base (10)..(10): bicyclic nucleic acid (BNA)
  modified_base (18)..(18): bicyclic nucleic acid (BNA)
  source: /note="3' tri-ethylene glycol (TEG)"
gguaaguuctguccaagc

SEQ ID NO: 22212 - RNA, 18 nt, Artificial Sequence
  source: /note="Description of Artificial Sequence: Synthetic oligonucleotide"
  source: /note="Antisense Oligonucleotide"
  modified_base (1)..(1): bicyclic nucleic acid (BNA)
  modified_base (2)..(2): bicyclic nucleic acid (BNA)
  modified_base (17)..(17): bicyclic nucleic acid (BNA)
  modified_base (18)..(18): bicyclic nucleic acid (BNA)
  source: /note="3' tri-ethylene glycol (TEG)"
gguaaguucuguccaagc

SEQ ID NO: 22213 - RNA, 18 nt, Artificial Sequence
  source: /note="Description of Artificial Sequence: Synthetic oligonucleotide"
  source: /note="Antisense Oligonucleotide"
  modified_base (1)..(1): bicyclic nucleic acid (BNA)
  modified_base (2)..(2): bicyclic nucleic acid (BNA)
  modified_base (11)..(11): bicyclic nucleic acid (BNA)
  modified_base (18)..(18): bicyclic nucleic acid (BNA)
  source: /note="3' tri-ethylene glycol (TEG)"
gguaaguucuguccaagc

SEQ ID NO: 22214 - RNA, 18 nt, Artificial Sequence
  source: /note="Description of Artificial Sequence: Synthetic oligonucleotide"
  source: /note="Antisense Oligonucleotide"
  modified_base (1)..(1): bicyclic nucleic acid (BNA)
  modified_base (2)..(2): bicyclic nucleic acid (BNA)
  modified_base (6)..(6): bicyclic nucleic acid (BNA)
  modified_base (11)..(11): bicyclic nucleic acid (BNA)
  modified_base (18)..(18): bicyclic nucleic acid (BNA)
  source: /note="3' tri-ethylene glycol (TEG)"
gguaaguucuguccaagc

SEQ ID NO: 22215 - RNA, 18 nt, Artificial Sequence
  source: /note="Description of Artificial Sequence: Synthetic oligonucleotide"
  source: /note="Antisense Oligonucleotide"
  modified_base (1)..(1): bicyclic nucleic acid (BNA)
  modified_base (2)..(2): bicyclic nucleic acid (BNA)
  modified_base (6)..(6): bicyclic nucleic acid (BNA)
  modified_base (11)..(11): bicyclic nucleic acid (BNA)
  modified_base (17)..(17): bicyclic nucleic acid (BNA)
  modified_base (18)..(18): bicyclic nucleic acid (BNA)
  source: /note="3' tri-ethylene glycol (TEG)"
gguaaguucuguccaagc

SEQ ID NO: 22216 - RNA, 18 nt, Artificial Sequence
  source: /note="Description of Artificial Sequence: Synthetic oligonucleotide"
  source: /note="Antisense Oligonucleotide"
  modified_base (1)..(1): bicyclic nucleic acid (BNA)
  modified_base (2)..(2): bicyclic nucleic acid (BNA)
  modified_base (18)..(18): bicyclic nucleic acid (BNA)
  source: /note="3' tri-ethylene glycol (TEG)"
gguaaguucuguccaagc

SEQ ID NO: 22217 - RNA, 18 nt, Artificial Sequence
  source: /note="Description of Artificial Sequence: Synthetic oligonucleotide"
  source: /note="Antisense Oligonucleotide"
  modified_base (1)..(1): bicyclic nucleic acid (BNA)
  modified_base (6)..(6): bicyclic nucleic acid (BNA)
  modified_base (18)..(18): bicyclic nucleic acid (BNA)
  source: /note="3' tri-ethylene glycol (TEG)"
gguaaguucuguccaagc

SEQ ID NO: 22218 - RNA, 18 nt, Artificial Sequence
  source: /note="Description of Artificial Sequence: Synthetic oligonucleotide"
  source: /note="Antisense Oligonucleotide"
  modified_base (1)..(1): bicyclic nucleic acid (BNA)
  modified_base (11)..(11): bicyclic nucleic acid (BNA)
  modified_base (18)..(18): bicyclic nucleic acid (BNA)
  source: /note="3' tri-ethylene glycol (TEG)"
gguaaguucuguccaagc

SEQ ID NO: 22219 - RNA, 18 nt, Artificial Sequence
  source: /note="Description of Artificial Sequence: Synthetic oligonucleotide"
  source: /note="Antisense Oligonucleotide"
  modified_base (1)..(1): bicyclic nucleic acid (BNA)
  modified_base (9)..(9): bicyclic nucleic acid (BNA)
  modified_base (18)..(18): bicyclic nucleic acid (BNA)
  source: /note="3' tri-ethylene glycol (TEG)"
gguaaguucuguccaagc

SEQ ID NO: 22220 - RNA, 18 nt, Artificial Sequence
  source: /note="Description of Artificial Sequence: Synthetic oligonucleotide"
  source: /note="Antisense Oligonucleotide"
  modified_base (1)..(1): bicyclic nucleic acid (BNA)
  modified_base (18)..(18): bicyclic nucleic acid (BNA)
  source: /note="3' tri-ethylene glycol (TEG)"
gguaaguucuguccaagc

SEQ ID NO: 22221 - RNA, 18 nt, Artificial Sequence
  source: /note="Description of Artificial Sequence: Synthetic oligonucleotide"
  source: /note="Antisense Oligonucleotide"
  source: /note="5' tri-ethylene glycol (TEG)"
  modified_base (1)..(1): bicyclic nucleic acid (BNA)
  modified_base (2)..(2): bicyclic nucleic acid (BNA)
  modified_base (6)..(6): bicyclic nucleic acid (BNA)
  modified_base (18)..(18): bicyclic nucleic acid (BNA)
  source: /note="3' tri-ethylene glycol (TEG)"
gguaaguucuguccaagc

SEQ ID NO: 22222 - RNA, 18 nt, Artificial Sequence
  source: /note="Description of Artificial Sequence: Synthetic oligonucleotide"
  source: /note="Antisense Oligonucleotide"
  source: /note="5' tri-ethylene glycol (TEG)"
  modified_base (1)..(1): bicyclic nucleic acid (BNA)
  modified_base (18)..(18): bicyclic nucleic acid (BNA)
  source: /note="3' tri-ethylene glycol (TEG)"
gguaaguucuguccaagc

SEQ ID NO: 22223 - DNA, 18 bp, Artificial Sequence
  source: /note="Description of Artificial Sequence: Synthetic oligonucleotide"
  source: /note="Description of Combined DNA/RNA Molecule: Synthetic oligonucleotide"
  source: /note="Antisense Oligonucleotide"
  source: /note="5' tri-ethylene glycol (TEG)"
  modified_base (1)..(1): bicyclic nucleic acid (BNA)
  modified_base (2)..(2): bicyclic nucleic acid (BNA)
  modified_base (10)..(10): bicyclic nucleic acid (BNA)
  modified_base (18)..(18): bicyclic nucleic acid (BNA)
  source: /note="3' tri-ethylene glycol (TEG)"
gguaaguuctguccaagc

SEQ ID NO: 22224 - RNA, 18 nt, Artificial Sequence
  source: /note="Description of Artificial Sequence: Synthetic oligonucleotide"
  source: /note="Antisense Oligonucleotide"
  source: /note="5' tri-ethylene glycol (TEG)"
  modified_base (1)..(1): bicyclic nucleic acid (BNA)
  modified_base (2)..(2): bicyclic nucleic acid (BNA)
  modified_base (17)..(17): bicyclic nucleic acid (BNA)
  modified_base (18)..(18): bicyclic nucleic acid (BNA)
  source: /note="3' tri-ethylene glycol (TEG)"
gguaaguucuguccaagc

SEQ ID NO: 22225 - RNA, 18 nt, Artificial Sequence
  source: /note="Description of Artificial Sequence: Synthetic oligonucleotide"
  source: /note="Antisense Oligonucleotide"
  source: /note="5' tri-ethylene glycol (TEG)"
  modified_base (1)..(1): bicyclic nucleic acid (BNA)
  modified_base (2)..(2): bicyclic nucleic acid (BNA)
  modified_base (11)..(11): bicyclic nucleic acid (BNA)
  modified_base (18)..(18): bicyclic nucleic acid (BNA)
  source: /note="3' tri-ethylene glycol (TEG)"
gguaaguucuguccaagc

SEQ ID NO: 22226 - RNA, 18 nt, Artificial Sequence
  source: /note="Description of Artificial Sequence: Synthetic oligonucleotide"
  source: /note="Antisense Oligonucleotide"
  source: /note="5' tri-ethylene glycol (TEG)"
  modified_base (1)..(1): bicyclic nucleic acid (BNA)
  modified_base (2)..(2): bicyclic nucleic acid (BNA)
  modified_base (6)..(6): bicyclic nucleic acid (BNA)
  modified_base (11)..(11): bicyclic nucleic acid (BNA)
  modified_base (18)..(18): bicyclic nucleic acid (BNA)
  source: /note="3' tri-ethylene glycol (TEG)"
gguaaguucuguccaagc

SEQ ID NO: 22227 - RNA, 18 nt, Artificial Sequence
  source: /note="Description of Artificial Sequence: Synthetic oligonucleotide"
  source: /note="Antisense Oligonucleotide"
  source: /note="5' tri-ethylene glycol (TEG)"
  modified_base (1)..(1): bicyclic nucleic acid (BNA)
  modified_base (2)..(2): bicyclic nucleic acid (BNA)
  modified_base (6)..(6): bicyclic nucleic acid (BNA)
  modified_base (11)..(11): bicyclic nucleic acid (BNA)
  modified_base (17)..(17): bicyclic nucleic acid (BNA)
  modified_base (18)..(18): bicyclic nucleic acid (BNA)
  source: /note="3' tri-ethylene glycol (TEG)"
gguaaguucuguccaagc

SEQ ID NO: 22228 - RNA, 18 nt, Artificial Sequence
  source: /note="Description of Artificial Sequence: Synthetic oligonucleotide"
  source: /note="Antisense Oligonucleotide"
  source: /note="5' tri-ethylene glycol (TEG)"
  modified_base (1)..(1): bicyclic nucleic acid (BNA)
  modified_base (2)..(2): bicyclic nucleic acid (BNA)
  modified_base (18)..(18): bicyclic nucleic acid (BNA)
  source: /note="3' tri-ethylene glycol (TEG)"
gguaaguucuguccaagc

SEQ ID NO: 22229 - RNA, 18 nt, Artificial Sequence
  source: /note="Description of Artificial Sequence: Synthetic oligonucleotide"
  source: /note="Antisense Oligonucleotide"
  source: /note="5' tri-ethylene glycol (TEG)"
  modified_base (1)..(1): bicyclic nucleic acid (BNA)
  modified_base (6)..(6): bicyclic nucleic acid (BNA)
  modified_base (18)..(18): bicyclic nucleic acid (BNA)
  source: /note="3' tri-ethylene glycol (TEG)"
gguaaguucuguccaagc

SEQ ID NO: 22230 - RNA, 18 nt, Artificial Sequence
  source: /note="Description of Artificial Sequence: Synthetic oligonucleotide"
  source: /note="Antisense Oligonucleotide"
  source: /note="5' tri-ethylene glycol (TEG)"
  modified_base (1)..(1): bicyclic nucleic acid (BNA)
  modified_base (11)..(11): bicyclic nucleic acid (BNA)
  modified_base (18)..(18): bicyclic nucleic acid (BNA)
  source: /note="3' tri-ethylene glycol (TEG)"
gguaaguucuguccaagc

SEQ ID NO: 22231 - RNA, 18 nt, Artificial Sequence
  source: /note="Description of Artificial Sequence: Synthetic oligonucleotide"
  source: /note="Antisense Oligonucleotide"
  source: /note="5' tri-ethylene glycol (TEG)"
  modified_base (1)..(1): bicyclic nucleic acid (BNA)
  modified_base (9)..(9): bicyclic nucleic acid (BNA)
  modified_base (18)..(18): bicyclic nucleic acid (BNA)
  source: /note="3' tri-ethylene glycol (TEG)"
gguaaguucuguccaagc

SEQ ID NO: 22232 - RNA, 18 nt, Artificial Sequence
  source: /note="Description of Artificial Sequence: Synthetic oligonucleotide"
  source: /note="Antisense Oligonucleotide"
  source: /note="5' tri-ethylene glycol (TEG)"
  modified_base (1)..(1): bicyclic nucleic acid (BNA)
  modified_base (18)..(18): bicyclic nucleic acid (BNA)
  source: /note="3' tri-ethylene glycol (TEG)"
gguaaguucuguccaagc

SEQ ID NO: 22233 - DNA, 20 bp, Artificial Sequence
  source: /note="Description of Artificial Sequence: Synthetic oligonucleotide"
  source: /note="Description of Combined DNA/RNA Molecule: Synthetic oligonucleotide"
  source: /note="Antisense Oligonucleotide"
  modified_base (1)..(1): bicyclic nucleic acid (BNA)
tcaaggaagauggcauuucu

SEQ ID NO: 22234 - RNA, 20 nt, Artificial Sequence
  source: /note="Description of Artificial Sequence: Synthetic oligonucleotide"
  source: /note="Antisense Oligonucleotide"
  modified_base (5)..(5): bicyclic nucleic acid (BNA)
ucaaggaagauggcauuucu

SEQ ID NO: 22235 - DNA, 20 bp, Artificial Sequence
  source: /note="Description of Artificial Sequence: Synthetic oligonucleotide"
  source: /note="Description of Combined DNA/RNA Molecule: Synthetic oligonucleotide"
  source: /note="Antisense Oligonucleotide"
  modified_base (1)..(1): bicyclic nucleic acid (BNA)
  modified_base (20)..(20): bicyclic nucleic acid (BNA)
tcaaggaagauggcauuuct

SEQ ID NO: 22236 - DNA, 20 bp, Artificial Sequence
  source: /note="Description of Artificial Sequence: Synthetic oligonucleotide"
  source: /note="Description of Combined DNA/RNA Molecule: Synthetic oligonucleotide"
  source: /note="Antisense Oligonucleotide"
  modified_base (1)..(1): bicyclic nucleic acid (BNA)
  modified_base (2)..(2): bicyclic nucleic acid (BNA)
tcaaggaagauggcauuucu

SEQ ID NO: 22237 - DNA, 20 bp, Artificial Sequence
  source: /note="Description of Artificial Sequence: Synthetic oligonucleotide"
  source: /note="Description of Combined DNA/RNA Molecule: Synthetic oligonucleotide"
  source: /note="Antisense Oligonucleotide"
  modified_base (1)..(1): bicyclic nucleic acid (BNA)
  modified_base (2)..(2): bicyclic nucleic acid (BNA)
  modified_base (13)..(13): bicyclic nucleic acid (BNA)
tcaaggaagauggcauuucu

SEQ ID NO: 22238 - DNA, 20 bp, Artificial Sequence
  source: /note="Description of Artificial Sequence: Synthetic oligonucleotide"
  source: /note="Description of Combined DNA/RNA Molecule: Synthetic oligonucleotide"
  source: /note="Antisense Oligonucleotide"
  modified_base (1)..(1): bicyclic nucleic acid (BNA)
  modified_base (2)..(2): bicyclic nucleic acid (BNA)
  modified_base (20)..(20): bicyclic nucleic acid (BNA)
tcaaggaagauggcauuuct

SEQ ID NO: 22239 - DNA, 20 bp, Artificial Sequence
  source: /note="Description of Artificial Sequence: Synthetic oligonucleotide"
  source: /note="Description of Combined DNA/RNA Molecule: Synthetic oligonucleotide"
  source: /note="Antisense Oligonucleotide"
  modified_base (1)..(1): bicyclic nucleic acid (BNA)
  modified_base (2)..(2): bicyclic nucleic acid (BNA)
  modified_base (10)..(10): bicyclic nucleic acid (BNA)
  modified_base (20)..(20): bicyclic nucleic acid (BNA)
tcaaggaagauggcauuuct

SEQ ID NO: 22240 - DNA, 20 bp, Artificial Sequence
  source: /note="Description of Artificial Sequence: Synthetic oligonucleotide"
  source: /note="Description of Combined DNA/RNA Molecule: Synthetic oligonucleotide"
  source: /note="Antisense Oligonucleotide"
  modified_base (1)..(1): bicyclic nucleic acid (BNA)
  modified_base (7)..(7): bicyclic nucleic acid (BNA)
  modified_base (15)..(15): bicyclic nucleic acid (BNA)
  modified_base (20)..(20): bicyclic nucleic acid (BNA)
tcaaggaagauggcauuuct

SEQ ID NO: 22241 - DNA, 20 bp, Artificial Sequence
  source: /note="Description of Artificial Sequence: Synthetic oligonucleotide"
  source: /note="Description of Combined DNA/RNA Molecule: Synthetic oligonucleotide"
  source: /note="Antisense Oligonucleotide"
  modified_base (1)..(1): bicyclic nucleic acid (BNA)
  modified_base (2)..(2): bicyclic nucleic acid (BNA)
  modified_base (7)..(7): bicyclic nucleic acid (BNA)
  modified_base (15)..(15): bicyclic nucleic acid (BNA)
  modified_base (20)..(20): bicyclic nucleic acid (BNA)
tcaaggaagauggcauuuct

SEQ ID NO: 22242 - DNA, 20 bp, Artificial Sequence
  source: /note="Description of Artificial Sequence: Synthetic oligonucleotide"
  source: /note="Description of Combined DNA/RNA Molecule: Synthetic oligonucleotide"
  source: /note="Antisense Oligonucleotide"
  modified_base (1)..(1): bicyclic nucleic acid (BNA)
  modified_base (2)..(2): bicyclic nucleic acid (BNA)
  modified_base (7)..(7): bicyclic nucleic acid (BNA)
  modified_base (11)..(11): bicyclic nucleic acid (BNA)
  modified_base (15)..(15): bicyclic nucleic acid (BNA)
  modified_base (20)..(20): bicyclic nucleic acid (BNA)
tcaaggaagatggcauuuct

SEQ ID NO: 22243 - DNA, 20 bp, Artificial Sequence
  source: /note="Description of Artificial Sequence: Synthetic oligonucleotide"
  source: /note="Description of Combined DNA/RNA Molecule: Synthetic oligonucleotide"
  source: /note="Antisense Oligonucleotide"
  modified_base (1)..(1): bicyclic nucleic acid (BNA)
  modified_base (2)..(2): bicyclic nucleic acid (BNA)
  modified_base (6)..(6): bicyclic nucleic acid (BNA)
  modified_base (10)..(10): bicyclic nucleic acid (BNA)
  modified_base (15)..(15): bicyclic nucleic acid (BNA)
  modified_base (20)..(20): bicyclic nucleic acid (BNA)
tcaaggaagauggcauuuct

SEQ ID NO: 22244 - DNA, 20 bp, Artificial Sequence
  source: /note="Description of Artificial Sequence: Synthetic oligonucleotide"
  source: /note="Description of Combined DNA/RNA Molecule: Synthetic oligonucleotide"
  source: /note="Antisense Oligonucleotide"
  modified_base (1)..(1): bicyclic nucleic acid (BNA)
  modified_base (9)..(9): bicyclic nucleic acid (BNA)
  modified_base (20)..(20): bicyclic nucleic acid (BNA)
tcaaggaagauggcauuuct

SEQ ID NO: 22245 - DNA, 20 bp, Artificial Sequence
  source: /note="Description of Artificial Sequence: Synthetic oligonucleotide"
  source: /note="Description of Combined DNA/RNA Molecule: Synthetic oligonucleotide"
  source: /note="Antisense Oligonucleotide"
  modified_base (1)..(1): bicyclic nucleic acid (BNA)
  modified_base (13)..(13): bicyclic nucleic acid (BNA)
  modified_base (20)..(20): bicyclic nucleic acid (BNA)
tcaaggaagauggcauuuct

SEQ ID NO: 22246 - DNA, 20 bp, Artificial Sequence
  source: /note="Description of Artificial Sequence: Synthetic oligonucleotide"
  source: /note="Description of Combined DNA/RNA Molecule: Synthetic oligonucleotide"
  source: /note="Antisense Oligonucleotide"
  modified_base (1)..(1): bicyclic nucleic acid (BNA)
  modified_base (9)..(9): bicyclic nucleic acid (BNA)
  modified_base (13)..(13): bicyclic nucleic acid (BNA)
  modified_base (20)..(20): bicyclic nucleic acid (BNA)
tcaaggaagauggcauuuct

SEQ ID NO: 22247 - DNA, 20 bp, Artificial Sequence
  source: /note="Description of Artificial Sequence: Synthetic oligonucleotide"
  source: /note="Description of Combined DNA/RNA Molecule: Synthetic oligonucleotide"
  source: /note="Antisense Oligonucleotide"
  modified_base (1)..(1): bicyclic nucleic acid (BNA)
  modified_base (6)..(6): bicyclic nucleic acid (BNA)
  modified_base (9)..(9): bicyclic nucleic acid (BNA)
  modified_base (13)..(13): bicyclic nucleic acid (BNA)
  modified_base (20)..(20): bicyclic nucleic acid (BNA)
tcaaggaagauggcauuuct

SEQ ID NO: 22248 - DNA, 20 bp, Artificial Sequence
  source: /note="Description of Artificial Sequence: Synthetic oligonucleotide"
  source: /note="Description of Combined DNA/RNA Molecule: Synthetic oligonucleotide"
  source: /note="Antisense Oligonucleotide"
  source: /note="5' tri-ethylene glycol (TEG)"
  modified_base (1)..(1): bicyclic nucleic acid (BNA)
tcaaggaagauggcauuucu

SEQ ID NO: 22249 - RNA, 20 nt, Artificial Sequence
  source: /note="Description of Artificial Sequence: Synthetic oligonucleotide"
  source: /note="Antisense Oligonucleotide"
  source: /note="5' tri-ethylene glycol (TEG)"
  modified_base (5)..(5): bicyclic nucleic acid (BNA)
ucaaggaagauggcauuucu

SEQ ID NO: 22250 - DNA, 20 bp, Artificial Sequence
  source: /note="Description of Artificial Sequence: Synthetic oligonucleotide"
  source: /note="Description of Combined DNA/RNA Molecule: Synthetic oligonucleotide"
  source: /note="Antisense Oligonucleotide"
  source: /note="5' tri-ethylene glycol (TEG)"
  modified_base (1)..(1): bicyclic nucleic acid (BNA)
  modified_base (20)..(20): bicyclic nucleic acid (BNA)
tcaaggaagauggcauuuct

SEQ ID NO: 22251 - DNA, 20 bp, Artificial Sequence
  source: /note="Description of Artificial Sequence: Synthetic oligonucleotide"
  source: /note="Description of Combined DNA/RNA Molecule: Synthetic oligonucleotide"
  source: /note="Antisense Oligonucleotide"
  source: /note="5' tri-ethylene glycol (TEG)"
  modified_base (1)..(1): bicyclic nucleic acid (BNA)
  modified_base (2)..(2): bicyclic nucleic acid (BNA)
tcaaggaagauggcauuucu

SEQ ID NO: 22252 - DNA, 20 bp, Artificial Sequence
  source: /note="Description of Artificial Sequence: Synthetic oligonucleotide"
  source: /note="Description of Combined DNA/RNA Molecule: Synthetic oligonucleotide"
  source: /note="Antisense Oligonucleotide"
  source: /note="5' tri-ethylene glycol (TEG)"
  modified_base (1)..(1): bicyclic nucleic acid (BNA)
  modified_base (2)..(2): bicyclic nucleic acid (BNA)
  modified_base (13)..(13): bicyclic nucleic acid (BNA)
tcaaggaagauggcauuucu

SEQ ID NO: 22253 - DNA, 20 bp, Artificial Sequence
  source: /note="Description of Artificial Sequence: Synthetic oligonucleotide"
  source: /note="Description of Combined DNA/RNA Molecule: Synthetic oligonucleotide"
  source: /note="Antisense Oligonucleotide"
  source: /note="5' tri-ethylene glycol (TEG)"
  modified_base (1)..(1): bicyclic nucleic acid (BNA)
  modified_base (2)..(2): bicyclic nucleic acid (BNA)
  modified_base (20)..(20): bicyclic nucleic acid (BNA)
tcaaggaagauggcauuuct

SEQ ID NO: 22254 - DNA, 20 bp, Artificial Sequence
  source: /note="Description of Artificial Sequence: Synthetic oligonucleotide"
  source: /note="Description of Combined DNA/RNA Molecule: Synthetic oligonucleotide"
  source: /note="Antisense Oligonucleotide"
  source: /note="5' tri-ethylene glycol (TEG)"
  modified_base (1)..(1): bicyclic nucleic acid (BNA)
  modified_base (2)..(2): bicyclic nucleic acid (BNA)
  modified_base (10)..(10): bicyclic nucleic acid (BNA)
  modified_base (20)..(20): bicyclic nucleic acid (BNA)
tcaaggaagauggcauuuct

SEQ ID NO: 22255 - DNA, 20 bp, Artificial Sequence
  source: /note="Description of Artificial Sequence: Synthetic oligonucleotide"
  source: /note="Description of Combined DNA/RNA Molecule: Synthetic oligonucleotide"
  source: /note="Antisense Oligonucleotide"
  source: /note="5' tri-ethylene glycol (TEG)"
  modified_base (1)..(1): bicyclic nucleic acid (BNA)
  modified_base (7)..(7): bicyclic nucleic acid (BNA)
  modified_base (15)..(15): bicyclic nucleic acid (BNA)
  modified_base (20)..(20): bicyclic nucleic acid (BNA)
tcaaggaagauggcauuuct

SEQ ID NO: 22256 - DNA, 20 bp, Artificial Sequence
  source: /note="Description of Artificial Sequence: Synthetic oligonucleotide"
  source: /note="Description of Combined DNA/RNA Molecule: Synthetic oligonucleotide"
  source: /note="Antisense Oligonucleotide"
  source: /note="5' tri-ethylene glycol (TEG)"
  modified_base (1)..(1): bicyclic nucleic acid (BNA)
  modified_base (2)..(2): bicyclic nucleic acid (BNA)
  modified_base (7)..(7): bicyclic nucleic acid (BNA)
  modified_base (15)..(15): bicyclic nucleic acid (BNA)
  modified_base (20)..(20): bicyclic nucleic acid (BNA)
tcaaggaagauggcauuuct

SEQ ID NO: 22257 - DNA, 20 bp, Artificial Sequence
  source: /note="Description of Artificial Sequence: Synthetic oligonucleotide"
  source: /note="Description of Combined DNA/RNA Molecule: Synthetic oligonucleotide"
  source: /note="Antisense Oligonucleotide"
  source: /note="5' tri-ethylene glycol (TEG)"
  modified_base (1)..(1): bicyclic nucleic acid (BNA)
  modified_base (2)..(2): bicyclic nucleic acid (BNA)
  modified_base (7)..(7): bicyclic nucleic acid (BNA)
  modified_base (11)..(11): bicyclic nucleic acid (BNA)
  modified_base (15)..(15): bicyclic nucleic acid (BNA)
  modified_base (20)..(20): bicyclic nucleic acid (BNA)
tcaaggaagatggcauuuct

SEQ ID NO: 22258 - DNA, 20 bp, Artificial Sequence
  source: /note="Description of Artificial Sequence: Synthetic oligonucleotide"
  source: /note="Description of Combined DNA/RNA Molecule: Synthetic oligonucleotide"
  source: /note="Antisense Oligonucleotide"
  source: /note="5' tri-ethylene glycol (TEG)"
  modified_base (1)..(1): bicyclic nucleic acid (BNA)
  modified_base (2)..(2): bicyclic nucleic acid (BNA)
  modified_base (6)..(6): bicyclic nucleic acid (BNA)
  modified_base (10)..(10): bicyclic nucleic acid (BNA)
  modified_base (15)..(15): bicyclic nucleic acid (BNA)
  modified_base (20)..(20): bicyclic nucleic acid (BNA)
tcaaggaagauggcauuuct

SEQ ID NO: 22259 - DNA, 20 bp, Artificial Sequence
  source: /note="Description of Artificial Sequence: Synthetic oligonucleotide"
  source: /note="Description of Combined DNA/RNA Molecule: Synthetic oligonucleotide"
  source: /note="Antisense Oligonucleotide"
  source: /note="5' tri-ethylene glycol (TEG)"
  modified_base (1)..(1): bicyclic nucleic acid (BNA)
  modified_base (9)..(9): bicyclic nucleic acid (BNA)
  modified_base (20)..(20): bicyclic nucleic acid (BNA)
tcaaggaagauggcauuuct

SEQ ID NO: 22260 - DNA, 20 bp, Artificial Sequence
  source: /note="Description of Artificial Sequence: Synthetic oligonucleotide"
  source: /note="Description of Combined DNA/RNA Molecule: Synthetic oligonucleotide"
  source: /note="Antisense Oligonucleotide"
  source: /note="5' tri-ethylene glycol (TEG)"
  modified_base (1)..(1): bicyclic nucleic acid (BNA)
  modified_base (13)..(13): bicyclic nucleic acid (BNA)
  modified_base (20)..(20): bicyclic nucleic acid (BNA)
tcaaggaagauggcauuuct

SEQ ID NO: 22261 - DNA, 20 bp, Artificial Sequence
  source: /note="Description of Artificial Sequence: Synthetic oligonucleotide"
  source: /note="Description of Combined DNA/RNA Molecule: Synthetic oligonucleotide"
  source: /note="Antisense Oligonucleotide"
  source: /note="5' tri-ethylene glycol (TEG)"
  modified_base (1)..(1): bicyclic nucleic acid (BNA)
  modified_base (9)..(9): bicyclic nucleic acid (BNA)
  modified_base (13)..(13): bicyclic nucleic acid (BNA)
  modified_base (20)..(20): bicyclic nucleic acid (BNA)
tcaaggaagauggcauuuct

SEQ ID NO: 22262 - DNA, 20 bp, Artificial Sequence
  source: /note="Description of Artificial Sequence: Synthetic oligonucleotide"
  source: /note="Description of Combined DNA/RNA Molecule: Synthetic oligonucleotide"
  source: /note="Antisense Oligonucleotide"
  source: /note="5' tri-ethylene glycol (TEG)"
  modified_base (1)..(1): bicyclic nucleic acid (BNA)
  modified_base (6)..(6): bicyclic nucleic acid (BNA)
  modified_base (9)..(9): bicyclic nucleic acid (BNA)
  modified_base (13)..(13): bicyclic nucleic acid (BNA)
  modified_base (20)..(20): bicyclic nucleic acid (BNA)
tcaaggaagauggcauuuct

SEQ ID NO: 22263 - DNA, 20 bp, Artificial Sequence
  source: /note="Description of Artificial Sequence: Synthetic oligonucleotide"
  source: /note="Description of Combined DNA/RNA Molecule: Synthetic oligonucleotide"
  source: /note="Antisense Oligonucleotide"
  modified_base (1)..(1): bicyclic nucleic acid (BNA)
  source: /note="3' tri-ethylene glycol (TEG)"
tcaaggaagauggcauuucu

SEQ ID NO: 22264 - RNA, 20 nt, Artificial Sequence
  source: /note="Description of Artificial Sequence: Synthetic oligonucleotide"
  source: /note="Antisense Oligonucleotide"
  modified_base (5)..(5): bicyclic nucleic acid (BNA)
  source: /note="3' tri-ethylene glycol (TEG)"
ucaaggaagauggcauuucu

SEQ ID NO: 22265 - DNA, 20 bp, Artificial Sequence
  source: /note="Description of Artificial Sequence: Synthetic oligonucleotide"
  source: /note="Description of Combined DNA/RNA Molecule: Synthetic oligonucleotide"
  source: /note="Antisense Oligonucleotide"
  modified_base (1)..(1): bicyclic nucleic acid (BNA)
  modified_base (20)..(20): bicyclic nucleic acid (BNA)
  source: /note="3' tri-ethylene glycol (TEG)"
tcaaggaagauggcauuuct

SEQ ID NO: 22266 - DNA, 20 bp, Artificial Sequence
  source: /note="Description of Artificial Sequence: Synthetic oligonucleotide"
  source: /note="Description of Combined DNA/RNA Molecule: Synthetic oligonucleotide"
  source: /note="Antisense Oligonucleotide"
  modified_base (1)..(1): bicyclic nucleic acid (BNA)
  modified_base (2)..(2): bicyclic nucleic acid (BNA)
  source: /note="3' tri-ethylene glycol (TEG)"
tcaaggaagauggcauuucu

SEQ ID NO: 22267 - DNA, 20 bp, Artificial Sequence
  source: /note="Description of Artificial Sequence: Synthetic oligonucleotide"
  source: /note="Description of Combined DNA/RNA Molecule: Synthetic oligonucleotide"
  source: /note="Antisense Oligonucleotide"
  modified_base (1)..(1): bicyclic nucleic acid (BNA)
  modified_base (2)..(2): bicyclic nucleic acid (BNA)
  modified_base (13)..(13): bicyclic nucleic acid (BNA)
  source: /note="3' tri-ethylene glycol (TEG)"
tcaaggaagauggcauuucu

SEQ ID NO: 22268 - DNA, 20 bp, Artificial Sequence
  source: /note="Description of Artificial Sequence: Synthetic oligonucleotide"
  source: /note="Description of Combined DNA/RNA Molecule: Synthetic oligonucleotide"
  source: /note="Antisense Oligonucleotide"
  modified_base (1)..(1): bicyclic nucleic acid (BNA)
  modified_base (2)..(2): bicyclic nucleic acid (BNA)
  modified_base (20)..(20): bicyclic nucleic acid (BNA)
  source: /note="3' tri-ethylene glycol (TEG)"
tcaaggaagauggcauuuct

SEQ ID NO: 22269 - DNA, 20 bp, Artificial Sequence
  source: /note="Description of Artificial Sequence: Synthetic oligonucleotide"
  source: /note="Description of Combined DNA/RNA Molecule: Synthetic oligonucleotide"
  source: /note="Antisense Oligonucleotide"
  modified_base (1)..(1): bicyclic nucleic acid (BNA)
  modified_base (2)..(2): bicyclic nucleic acid (BNA)
  modified_base (10)..(10): bicyclic nucleic acid (BNA)
  modified_base (20)..(20): bicyclic nucleic acid (BNA)
  source: /note="3' tri-ethylene glycol (TEG)"
tcaaggaagauggcauuuct

SEQ ID NO: 22270 - DNA, 20 bp, Artificial Sequence
  source: /note="Description of Artificial Sequence: Synthetic oligonucleotide"
  source: /note="Description of Combined DNA/RNA Molecule: Synthetic oligonucleotide"
  source: /note="Antisense Oligonucleotide"
  modified_base (1)..(1): bicyclic nucleic acid (BNA)
  modified_base (7)..(7): bicyclic nucleic acid (BNA)
  modified_base (15)..(15): bicyclic nucleic acid (BNA)
  modified_base (20)..(20): bicyclic nucleic acid (BNA)
  source: /note="3' tri-ethylene glycol (TEG)"
tcaaggaagauggcauuuct

SEQ ID NO: 22271 - DNA, 20 bp, Artificial Sequence
  source: /note="Description of Artificial Sequence: Synthetic oligonucleotide"
  source: /note="Description of Combined DNA/RNA Molecule: Synthetic oligonucleotide"
  source: /note="Antisense Oligonucleotide"
  modified_base (1)..(1): bicyclic nucleic acid (BNA)
  modified_base (2)..(2): bicyclic nucleic acid (BNA)
  modified_base (7)..(7): bicyclic nucleic acid (BNA)
  modified_base (15)..(15): bicyclic nucleic acid (BNA)
  modified_base (20)..(20): bicyclic nucleic acid (BNA)
  source: /note="3' tri-ethylene glycol (TEG)"
tcaaggaagauggcauuuct

SEQ ID NO: 22272 - DNA, 20 bp, Artificial Sequence
  source: /note="Description of Artificial Sequence: Synthetic oligonucleotide"
  source: /note="Description of Combined DNA/RNA Molecule: Synthetic oligonucleotide"
  source: /note="Antisense Oligonucleotide"
  modified_base (1)..(1): bicyclic nucleic acid (BNA)
  modified_base (2)..(2): bicyclic nucleic acid (BNA)
  modified_base (7)..(7): bicyclic nucleic acid (BNA)
  modified_base (11)..(11): bicyclic nucleic acid (BNA)
  modified_base (15)..(15): bicyclic nucleic acid (BNA)
  modified_base (20)..(20): bicyclic nucleic acid (BNA)
  source: /note="3' tri-ethylene glycol (TEG)"
tcaaggaagatggcauuuct

SEQ ID NO: 22273 - DNA, 20 bp, Artificial Sequence
  source: /note="Description of Artificial Sequence: Synthetic oligonucleotide"
  source: /note="Description of Combined DNA/RNA Molecule: Synthetic oligonucleotide"
  source: /note="Antisense Oligonucleotide"
  modified_base (1)..(1): bicyclic nucleic acid (BNA)
  modified_base (2)..(2): bicyclic nucleic acid (BNA)
  modified_base (6)..(6): bicyclic nucleic acid (BNA)
  modified_base (10)..(10): bicyclic nucleic acid (BNA)
  modified_base (15)..(15): bicyclic nucleic acid (BNA)
  modified_base (20)..(20): bicyclic nucleic acid (BNA)
  source: /note="3' tri-ethylene glycol (TEG)"
tcaaggaagauggcauuuct

SEQ ID NO: 22274 - DNA, 20 bp, Artificial Sequence
  source: /note="Description of Artificial Sequence: Synthetic oligonucleotide"
  source: /note="Description of Combined DNA/RNA Molecule: Synthetic oligonucleotide"
  source: /note="Antisense Oligonucleotide"
  modified_base (1)..(1): bicyclic nucleic acid (BNA)
  modified_base (9)..(9): bicyclic nucleic acid (BNA)
  modified_base (20)..(20): bicyclic nucleic acid (BNA)
  source: /note="3' tri-ethylene glycol (TEG)"
tcaaggaagauggcauuuct

SEQ ID NO: 22275 - DNA, 20 bp, Artificial Sequence
  source: /note="Description of Artificial Sequence: Synthetic oligonucleotide"
  source: /note="Description of Combined DNA/RNA Molecule: Synthetic oligonucleotide"
  source: /note="Antisense Oligonucleotide"
  modified_base (1)..(1): bicyclic nucleic acid (BNA)
  modified_base (13)..(13): bicyclic nucleic acid (BNA)
  modified_base (20)..(20): bicyclic nucleic acid (BNA)
  source: /note="3' tri-ethylene glycol (TEG)"
tcaaggaagauggcauuuct

SEQ ID NO: 22276 - DNA, 20 bp, Artificial Sequence
  source: /note="Description of Artificial Sequence: Synthetic oligonucleotide"
  source: /note="Description of Combined DNA/RNA Molecule: Synthetic oligonucleotide"
  source: /note="Antisense Oligonucleotide"
  modified_base (1)..(1): bicyclic nucleic acid (BNA)
  modified_base (9)..(9): bicyclic nucleic acid (BNA)
  modified_base (13)..(13): bicyclic nucleic acid (BNA)
  modified_base (20)..(20): bicyclic nucleic acid (BNA)
  source: /note="3' tri-ethylene glycol (TEG)"
tcaaggaagauggcauuuct

SEQ ID NO: 22277 - DNA, 20 bp, Artificial Sequence
  source: /note="Description of Artificial Sequence: Synthetic oligonucleotide"
  source: /note="Description of Combined DNA/RNA Molecule: Synthetic oligonucleotide"
  source: /note="Antisense Oligonucleotide"
  modified_base (1)..(1): bicyclic nucleic acid (BNA)
  modified_base (6)..(6): bicyclic nucleic acid (BNA)
  modified_base (9)..(9): bicyclic nucleic acid (BNA)
  modified_base (13)..(13): bicyclic nucleic acid (BNA)
  modified_base (20)..(20): bicyclic nucleic acid (BNA)
  source: /note="3' tri-ethylene glycol (TEG)"
tcaaggaagauggcauuuct

SEQ ID NO: 22278 - DNA, 20 bp, Artificial Sequence
  source: /note="Description of Artificial Sequence: Synthetic oligonucleotide"
  source: /note="Description of Combined DNA/RNA Molecule: Synthetic oligonucleotide"
  source: /note="Antisense Oligonucleotide"
  source: /note="5' tri-ethylene glycol (TEG)"
  modified_base (1)..(1): bicyclic nucleic acid (BNA)
  source: /note="3' tri-ethylene glycol (TEG)"
tcaaggaagauggcauuucu

SEQ ID NO: 22279 - RNA, 20 nt, Artificial Sequence
  source: /note="Description of Artificial Sequence: Synthetic oligonucleotide"
  source: /note="Antisense Oligonucleotide"
  source: /note="5' tri-ethylene glycol (TEG)"
  modified_base (5)..(5): bicyclic nucleic acid (BNA)
  source: /note="3' tri-ethylene glycol (TEG)"
ucaaggaagauggcauuucu

SEQ ID NO: 22280 - DNA, 20 bp, Artificial Sequence
  source: /note="Description of Artificial Sequence: Synthetic oligonucleotide"
  source: /note="Description of Combined DNA/RNA Molecule: Synthetic oligonucleotide"
  source: /note="Antisense Oligonucleotide"
  source: /note="5' tri-ethylene glycol (TEG)"
  modified_base (1)..(1): bicyclic nucleic acid (BNA)
  modified_base (20)..(20): bicyclic nucleic acid (BNA)
  source: /note="3' tri-ethylene glycol (TEG)"
tcaaggaagauggcauuuct

SEQ ID NO: 22281 - DNA, 20 bp, Artificial Sequence
  source: /note="Description of Artificial Sequence: Synthetic oligonucleotide"
  source: /note="Description of Combined DNA/RNA Molecule: Synthetic oligonucleotide"
  source: /note="Antisense Oligonucleotide"
  source: /note="5' tri-ethylene glycol (TEG)"
  modified_base (1)..(1): bicyclic nucleic acid (BNA)
  modified_base (2)..(2): bicyclic nucleic acid (BNA)
  source: /note="3' tri-ethylene glycol (TEG)"
tcaaggaagauggcauuucu

SEQ ID NO: 22282 - DNA, 20 bp, Artificial Sequence
  source: /note="Description of Artificial Sequence: Synthetic oligonucleotide"
  source: /note="Description of Combined DNA/RNA Molecule: Synthetic oligonucleotide"
  source: /note="Antisense Oligonucleotide"
  source: /note="5' tri-ethylene glycol (TEG)"
  modified_base (1)..(1): bicyclic nucleic acid (BNA)
  modified_base (2)..(2): bicyclic nucleic acid (BNA)
  modified_base (13)..(13): bicyclic nucleic acid (BNA)
  source: /note="3' tri-ethylene glycol (TEG)"
tcaaggaagauggcauuucu

SEQ ID NO: 22283 - DNA, 20 bp, Artificial Sequence
  source: /note="Description of Artificial Sequence: Synthetic oligonucleotide"
  source: /note="Description of Combined DNA/RNA Molecule: Synthetic oligonucleotide"
  source: /note="Antisense Oligonucleotide"
  source: /note="5' tri-ethylene glycol (TEG)"
  modified_base (1)..(1): bicyclic nucleic acid (BNA)
  modified_base (2)..(2): bicyclic nucleic acid (BNA)
  modified_base (20)..(20): bicyclic nucleic acid (BNA)
  source: /note="3' tri-ethylene glycol (TEG)"
tcaaggaagauggcauuuct

SEQ ID NO: 22284 - DNA, 20 bp, Artificial Sequence
  source: /note="Description of Artificial Sequence: Synthetic oligonucleotide"
  source: /note="Description of Combined DNA/RNA Molecule: Synthetic oligonucleotide"
  source: /note="Antisense Oligonucleotide"
  source: /note="5' tri-ethylene glycol (TEG)"
  modified_base (1)..(1): bicyclic nucleic acid (BNA)
  modified_base (2)..(2): bicyclic nucleic acid (BNA)
  modified_base (10)..(10): bicyclic nucleic acid (BNA)
  modified_base (20)..(20): bicyclic nucleic acid (BNA)
  source: /note="3' tri-ethylene glycol (TEG)"
tcaaggaagauggcauuuct

SEQ ID NO: 22285 - DNA, 20 bp, Artificial Sequence
  source: /note="Description of Artificial Sequence: Synthetic oligonucleotide"
  source: /note="Description of Combined DNA/RNA Molecule: Synthetic oligonucleotide"
  source: /note="Antisense Oligonucleotide"
  source: /note="5' tri-ethylene glycol (TEG)"
  modified_base (1)..(1): bicyclic nucleic acid (BNA)
  modified_base (7)..(7): bicyclic nucleic acid (BNA)
  modified_base (15)..(15): bicyclic nucleic acid (BNA)
  modified_base (20)..(20): bicyclic nucleic acid (BNA)
  source: /note="3' tri-ethylene glycol (TEG)"
tcaaggaagauggcauuuct

SEQ ID NO: 22286 - DNA, 20 bp, Artificial Sequence
  source: /note="Description of Artificial Sequence: Synthetic oligonucleotide"
  source: /note="Description of Combined DNA/RNA Molecule: Synthetic oligonucleotide"
  source: /note="Antisense Oligonucleotide"
  source: /note="5' tri-ethylene glycol (TEG)"
  modified_base (1)..(1): bicyclic nucleic acid (BNA)
  modified_base (2)..(2): bicyclic nucleic acid (BNA)
  modified_base (7)..(7): bicyclic nucleic acid (BNA)
  modified_base (15)..(15): bicyclic nucleic acid (BNA)
  modified_base (20)..(20): bicyclic nucleic acid (BNA)
  source: /note="3' tri-ethylene glycol (TEG)"
tcaaggaagauggcauuuct

SEQ ID NO: 22287 - DNA, 20 bp, Artificial Sequence
  source: /note="Description of Artificial Sequence: Synthetic oligonucleotide"
  source: /note="Description of Combined DNA/RNA Molecule: Synthetic oligonucleotide"
  source: /note="Antisense Oligonucleotide"
  source: /note="5' tri-ethylene glycol (TEG)"
  modified_base (1)..(1): bicyclic nucleic acid (BNA)
  modified_base (2)..(2): bicyclic nucleic acid (BNA)
  modified_base (7)..(7): bicyclic nucleic acid (BNA)
  modified_base (11)..(11): bicyclic nucleic acid (BNA)
  modified_base (15)..(15): bicyclic nucleic acid (BNA)
  modified_base (20)..(20): bicyclic nucleic acid (BNA)
  source: /note="3' tri-ethylene glycol (TEG)"
tcaaggaagatggcauuuct

SEQ ID NO: 22288 - DNA, 20 bp, Artificial Sequence
  source: /note="Description of Artificial Sequence: Synthetic oligonucleotide"
  source: /note="Description of Combined DNA/RNA Molecule: Synthetic oligonucleotide"
  source: /note="Antisense Oligonucleotide"
  source: /note="5' tri-ethylene glycol (TEG)"
  modified_base (1)..(1): bicyclic nucleic acid (BNA)
  modified_base (2)..(2): bicyclic nucleic acid (BNA)
  modified_base (6)..(6): bicyclic nucleic acid (BNA)
  modified_base (10)..(10): bicyclic nucleic acid (BNA)
  modified_base (15)..(15): bicyclic nucleic acid (BNA)
  modified_base (20)..(20): bicyclic nucleic acid (BNA)
  source: /note="3' tri-ethylene glycol (TEG)"
tcaaggaagauggcauuuct

SEQ ID NO: 22289 - DNA, 20 bp, Artificial Sequence
  source: /note="Description of Artificial Sequence: Synthetic oligonucleotide"
  source: /note="Description of Combined DNA/RNA Molecule: Synthetic oligonucleotide"
  source: /note="Antisense Oligonucleotide"
  source: /note="5' tri-ethylene glycol (TEG)"
  modified_base (1)..(1): bicyclic nucleic acid (BNA)
  modified_base (9)..(9): bicyclic nucleic acid (BNA)
  modified_base (20)..(20): bicyclic nucleic acid (BNA)
  source: /note="3' tri-ethylene glycol (TEG)"
tcaaggaagauggcauuuct

SEQ ID NO: 22290 - DNA, 20 bp, Artificial Sequence
  source: /note="Description of Artificial Sequence: Synthetic oligonucleotide"
  source: /note="Description of Combined DNA/RNA Molecule: Synthetic oligonucleotide"
  source: /note="Antisense Oligonucleotide"
  source: /note="5' tri-ethylene glycol (TEG)"
  modified_base (1)..(1): bicyclic nucleic acid (BNA)
  modified_base (13)..(13): bicyclic nucleic acid (BNA)
  modified_base (20)..(20): bicyclic nucleic acid (BNA)
  source: /note="3' tri-ethylene glycol (TEG)"
tcaaggaagauggcauuuct

SEQ ID NO: 22291 - DNA, 20 bp, Artificial Sequence
  source: /note="Description of Artificial Sequence: Synthetic oligonucleotide"
  source: /note="Description of Combined DNA/RNA Molecule: Synthetic oligonucleotide"
  source: /note="Antisense Oligonucleotide"
  source: /note="5' tri-ethylene glycol (TEG)"
  modified_base (1)..(1): bicyclic nucleic acid (BNA)
  modified_base (9)..(9): bicyclic nucleic acid (BNA)
  modified_base (13)..(13): bicyclic nucleic acid (BNA)
  modified_base (20)..(20): bicyclic nucleic acid (BNA)
  source: /note="3' tri-ethylene glycol (TEG)"
tcaaggaagauggcauuuct

SEQ ID NO: 22292 - DNA, 20 bp, Artificial Sequence
  source: /note="Description of Artificial Sequence: Synthetic oligonucleotide"
  source: /note="Description of Combined DNA/RNA Molecule: Synthetic oligonucleotide"
  source: /note="Antisense Oligonucleotide"
  source: /note="5' tri-ethylene glycol (TEG)"
  modified_base (1)..(1): bicyclic nucleic acid (BNA)
  modified_base (6)..(6): bicyclic nucleic acid (BNA)
  modified_base (9)..(9): bicyclic nucleic acid (BNA)
  modified_base (13)..(13): bicyclic nucleic acid (BNA)
  modified_base (20)..(20): bicyclic nucleic acid (BNA)
  source: /note="3' tri-ethylene glycol (TEG)"
tcaaggaagauggcauuuct

SEQ ID NO: 22293 - DNA, 22 bp, Artificial Sequence
  source: /note="Description of Artificial Sequence: Synthetic oligonucleotide"
  source: /note="Description of Combined DNA/RNA Molecule: Synthetic oligonucleotide"
  source: /note="Antisense Oligonucleotide"
  modified_base (1)..(1): bicyclic nucleic acid (BNA)
tcaaggaagauggcauuucuag

SEQ ID NO: 22294 - DNA, 22 bp, Artificial Sequence
  source: /note="Description of Artificial Sequence: Synthetic oligonucleotide"
  source: /note="Description of Combined DNA/RNA Molecule: Synthetic oligonucleotide"
  source: /note="Antisense Oligonucleotide"
  modified_base (1)..(1): bicyclic nucleic acid (BNA)
  modified_base (2)..(2): bicyclic nucleic acid (BNA)
tcaaggaagauggcauuucuag

SEQ ID NO: 22295 - DNA, 22 bp, Artificial Sequence
  source: /note="Description of Artificial Sequence: Synthetic oligonucleotide"
  source: /note="Description of Combined DNA/RNA Molecule: Synthetic oligonucleotide"
  source: /note="Antisense Oligonucleotide"
  modified_base (1)..(1): bicyclic nucleic acid (BNA)
  modified_base (22)..(22): bicyclic nucleic acid (BNA)
tcaaggaagauggcauuucuag

SEQ ID NO: 22296 - DNA, 22 bp, Artificial Sequence
  source: /note="Description of Artificial Sequence: Synthetic oligonucleotide"
  source: /note="Description of Combined DNA/RNA Molecule: Synthetic oligonucleotide"
  source: /note="Antisense Oligonucleotide"
  modified_base (1)..(1): bicyclic nucleic acid (BNA)
  modified_base (2)..(2): bicyclic nucleic acid (BNA)
  modified_base (22)..(22): bicyclic nucleic acid (BNA)
tcaaggaagauggcauuucuag

SEQ ID NO: 22297 - DNA, 22 bp, Artificial Sequence
  source: /note="Description of Artificial Sequence: Synthetic oligonucleotide"
  source: /note="Description of Combined DNA/RNA Molecule: Synthetic oligonucleotide"
  source: /note="Antisense Oligonucleotide"
  modified_base (1)..(1): bicyclic nucleic acid (BNA)
  modified_base (2)..(2): bicyclic nucleic acid (BNA)
  modified_base (10)..(10): bicyclic nucleic acid (BNA)
  modified_base (22)..(22): bicyclic nucleic acid (BNA)
tcaaggaagauggcauuucuag

SEQ ID NO: 22298 - DNA, 22 bp, Artificial Sequence
  source: /note="Description of Artificial Sequence: Synthetic oligonucleotide"
  source: /note="Description of Combined DNA/RNA Molecule: Synthetic oligonucleotide"
  source: /note="Antisense Oligonucleotide"
  modified_base (1)..(1): bicyclic nucleic acid (BNA)
  modified_base (2)..(2): bicyclic nucleic acid (BNA)
  modified_base (10)..(10): bicyclic nucleic acid (BNA)
  modified_base (15)..(15): bicyclic nucleic acid (BNA)
  modified_base (22)..(22): bicyclic nucleic acid (BNA)
tcaaggaagauggcauuucuag

SEQ ID NO: 22299 - DNA, 22 bp, Artificial Sequence
  source: /note="Description of Artificial Sequence: Synthetic oligonucleotide"
  source: /note="Description of Combined DNA/RNA Molecule: Synthetic oligonucleotide"
  source: /note="Antisense Oligonucleotide"
  modified_base (1)..(1): bicyclic nucleic acid (BNA)
  modified_base (2)..(2): bicyclic nucleic acid (BNA)
  modified_base (13)..(13): bicyclic nucleic acid (BNA)
  modified_base (22)..(22): bicyclic nucleic acid (BNA)
tcaaggaagauggcauuucuag

SEQ ID NO: 22300 - DNA, 22 bp, Artificial Sequence
  source: /note="Description of Artificial Sequence: Synthetic oligonucleotide"
  source: /note="Description of Combined DNA/RNA Molecule: Synthetic oligonucleotide"
  source: /note="Antisense Oligonucleotide"
  modified_base (1)..(1): bicyclic nucleic acid (BNA)
  modified_base (2)..(2): bicyclic nucleic acid (BNA)
  modified_base (9)..(9): bicyclic nucleic acid (BNA)
  modified_base (22)..(22): bicyclic nucleic acid (BNA)
tcaaggaagauggcauuucuag

SEQ ID NO: 22301 - DNA, 22 bp, Artificial Sequence
  source: /note="Description of Artificial Sequence: Synthetic oligonucleotide"
  source: /note="Description of Combined DNA/RNA Molecule: Synthetic oligonucleotide"
  source: /note="Antisense Oligonucleotide"
  modified_base (1)..(1): bicyclic nucleic acid (BNA)
  modified_base (2)..(2): bicyclic nucleic acid (BNA)
  modified_base (9)..(9): bicyclic nucleic acid (BNA)
  modified_base (13)..(13): bicyclic nucleic acid (BNA)
  modified_base (22)..(22): bicyclic nucleic acid (BNA)
tcaaggaagauggcauuucuag

SEQ ID NO: 22302 - DNA, 22 bp, Artificial Sequence
  source: /note="Description of Artificial Sequence: Synthetic oligonucleotide"
  source: /note="Description of Combined DNA/RNA Molecule: Synthetic oligonucleotide"
  source: /note="Antisense Oligonucleotide"
  modified_base (1)..(1): bicyclic nucleic acid (BNA)
  modified_base (2)..(2): bicyclic nucleic acid (BNA)
  modified_base (5)..(5): bicyclic nucleic acid (BNA)
  modified_base (9)..(9): bicyclic nucleic acid (BNA)
  modified_base (13)..(13): bicyclic nucleic acid (BNA)
  modified_base (22)..(22): bicyclic nucleic acid (BNA)
tcaaggaagauggcauuucuag

SEQ ID NO: 22303 - DNA, 22 bp, Artificial Sequence
  source: /note="Description of Artificial Sequence: Synthetic oligonucleotide"
  source: /note="Description of Combined DNA/RNA Molecule: Synthetic oligonucleotide"
  source: /note="Antisense Oligonucleotide"
  source: /note="5' tri-ethylene glycol (TEG)"
  modified_base (1)..(1): bicyclic nucleic acid (BNA)
tcaaggaagauggcauuucuag

SEQ ID NO: 22304 - DNA, 22 bp, Artificial Sequence
  source: /note="Description of Artificial Sequence: Synthetic oligonucleotide"
  source: /note="Description of Combined DNA/RNA Molecule: Synthetic oligonucleotide"
  source: /note="Antisense Oligonucleotide"
  source: /note="5' tri-ethylene glycol (TEG)"
  modified_base (1)..(1): bicyclic nucleic acid (BNA)
  modified_base (2)..(2): bicyclic nucleic acid (BNA)
tcaaggaagauggcauuucuag

SEQ ID NO: 22305 - DNA, 22 bp, Artificial Sequence
  source: /note="Description of Artificial Sequence: Synthetic oligonucleotide"
  source: /note="Description of Combined DNA/RNA Molecule: Synthetic oligonucleotide"
  source: /note="Antisense Oligonucleotide"
  source: /note="5' tri-ethylene glycol (TEG)"
  modified_base (1)..(1): bicyclic nucleic acid (BNA)
  modified_base (22)..(22): bicyclic nucleic acid (BNA)
tcaaggaagauggcauuucuag

SEQ ID NO: 22306 - DNA, 22 bp, Artificial Sequence
  source: /note="Description of Artificial Sequence: Synthetic oligonucleotide"
  source: /note="Description of Combined DNA/RNA Molecule: Synthetic oligonucleotide"
  source: /note="Antisense Oligonucleotide"
  source: /note="5' tri-ethylene glycol (TEG)"
  modified_base (1)..(1): bicyclic nucleic acid (BNA)
  modified_base (2)..(2): bicyclic nucleic acid (BNA)
  modified_base (22)..(22): bicyclic nucleic acid (BNA)
tcaaggaagauggcauuucuag

SEQ ID NO: 22307 - DNA, 22 bp, Artificial Sequence
  source: /note="Description of Artificial Sequence: Synthetic oligonucleotide"
  source: /note="Description of Combined DNA/RNA Molecule: Synthetic oligonucleotide"
  source: /note="Antisense Oligonucleotide"
  source: /note="5' tri-ethylene glycol (TEG)"
  modified_base (1)..(1): bicyclic nucleic acid (BNA)
  modified_base (2)..(2): bicyclic nucleic acid (BNA)
  modified_base (10)..(10): bicyclic nucleic acid (BNA)
  modified_base (22)..(22): bicyclic nucleic acid (BNA)
tcaaggaagauggcauuucuag

SEQ ID NO: 22308 - DNA, 22 bp, Artificial Sequence
  source: /note="Description of Artificial Sequence: Synthetic oligonucleotide"
  source: /note="Description of Combined DNA/RNA Molecule: Synthetic oligonucleotide"
  source: /note="Antisense Oligonucleotide"
  source: /note="5' tri-ethylene glycol (TEG)"
  modified_base (1)..(1): bicyclic nucleic acid (BNA)
  modified_base (2)..(2): bicyclic nucleic acid (BNA)
  modified_base (10)..(10): bicyclic nucleic acid (BNA)
  modified_base (15)..(15): bicyclic nucleic acid (BNA)
  modified_base (22)..(22): bicyclic nucleic acid (BNA)
tcaaggaagauggcauuucuag

SEQ ID NO: 22309 - DNA, 22 bp, Artificial Sequence
  source: /note="Description of Artificial Sequence: Synthetic oligonucleotide"
  source: /note="Description of Combined DNA/RNA Molecule: Synthetic oligonucleotide"
  source: /note="Antisense Oligonucleotide"
  source: /note="5' tri-ethylene glycol (TEG)"
  modified_base (1)..(1): bicyclic nucleic acid (BNA)
  modified_base (2)..(2): bicyclic nucleic acid (BNA)
  modified_base (13)..(13): bicyclic nucleic acid (BNA)
  modified_base (22)..(22): bicyclic nucleic acid (BNA)
tcaaggaagauggcauuucuag

SEQ ID NO: 22310 - DNA, 22 bp, Artificial Sequence
  source: /note="Description of Artificial Sequence: Synthetic oligonucleotide"
  source: /note="Description of Combined DNA/RNA Molecule: Synthetic oligonucleotide"
  source: /note="Antisense Oligonucleotide"
  source: /note="5' tri-ethylene glycol (TEG)"
  modified_base (1)..(1): bicyclic nucleic acid (BNA)
  modified_base (2)..(2): bicyclic nucleic acid (BNA)
  modified_base (9)..(9): bicyclic nucleic acid (BNA)
  modified_base (22)..(22): bicyclic nucleic acid (BNA)
tcaaggaagauggcauuucuag

SEQ ID NO: 22311 - DNA, 22 bp, Artificial Sequence
  source: /note="Description of Artificial Sequence: Synthetic oligonucleotide"
  source: /note="Description of Combined DNA/RNA Molecule: Synthetic oligonucleotide"
  source: /note="Antisense Oligonucleotide"
  source: /note="5' tri-ethylene glycol (TEG)"
  modified_base (1)..(1): bicyclic nucleic acid (BNA)
  modified_base (2)..(2): bicyclic nucleic acid (BNA)
  modified_base (9)..(9): bicyclic nucleic acid (BNA)
  modified_base (13)..(13): bicyclic nucleic acid (BNA)
  modified_base (22)..(22): bicyclic nucleic acid (BNA)
tcaaggaagauggcauuucuag

SEQ ID NO: 22312 - DNA, 22 bp, Artificial Sequence
  source: /note="Description of Artificial Sequence: Synthetic oligonucleotide"
  source: /note="Description of Combined DNA/RNA Molecule: Synthetic oligonucleotide"
  source: /note="Antisense Oligonucleotide"
  source: /note="5' tri-ethylene glycol (TEG)"
  modified_base (1)..(1): bicyclic nucleic acid (BNA)
  modified_base (2)..(2): bicyclic nucleic acid (BNA)
  modified_base (5)..(5): bicyclic nucleic acid (BNA)
  modified_base (9)..(9): bicyclic nucleic acid (BNA)
  modified_base (13)..(13): bicyclic nucleic acid (BNA)
  modified_base (22)..(22): bicyclic nucleic acid (BNA)
tcaaggaagauggcauuucuag

SEQ ID NO: 22313 - DNA, 22 bp, Artificial Sequence
  source: /note="Description of Artificial Sequence: Synthetic oligonucleotide"
  source: /note="Description of Combined DNA/RNA Molecule: Synthetic oligonucleotide"
  source: /note="Antisense Oligonucleotide"
  modified_base (1)..(1): bicyclic nucleic acid (BNA)
  source: /note="3' tri-ethylene glycol (TEG)"
tcaaggaagauggcauuucuag

SEQ ID NO: 22314 - DNA, 22 bp, Artificial Sequence
  source: /note="Description of Artificial Sequence: Synthetic oligonucleotide"
  source: /note="Description of Combined DNA/RNA Molecule: Synthetic oligonucleotide"
  source: /note="Antisense Oligonucleotide"
  modified_base (1)..(1): bicyclic nucleic acid (BNA)
  modified_base (2)..(2): bicyclic nucleic acid (BNA)
  source: /note="3' tri-ethylene glycol (TEG)"
tcaaggaagauggcauuucuag

SEQ ID NO: 22315 - DNA, 22 bp, Artificial Sequence
  source: /note="Description of Artificial Sequence: Synthetic oligonucleotide"
  source: /note="Description of Combined DNA/RNA Molecule: Synthetic oligonucleotide"
  source: /note="Antisense Oligonucleotide"
  modified_base (1)..(1): bicyclic nucleic acid (BNA)
  modified_base (22)..(22): bicyclic nucleic acid (BNA)
  source: /note="3' tri-ethylene glycol (TEG)"
tcaaggaagauggcauuucuag

SEQ ID NO: 22316 - DNA, 22 bp, Artificial Sequence
  source: /note="Description of Artificial Sequence: Synthetic oligonucleotide"
  source: /note="Description of Combined DNA/RNA Molecule: Synthetic oligonucleotide"
  source: /note="Antisense Oligonucleotide"
  modified_base (1)..(1): bicyclic nucleic acid (BNA)
  modified_base (2)..(2): bicyclic nucleic acid (BNA)
  modified_base (22)..(22): bicyclic nucleic acid (BNA)
  source: /note="3' tri-ethylene glycol (TEG)"
tcaaggaagauggcauuucuag

SEQ ID NO: 22317 - DNA, 22 bp, Artificial Sequence
  source: /note="Description of Artificial Sequence: Synthetic oligonucleotide"
  source: /note="Description of Combined DNA/RNA Molecule: Synthetic oligonucleotide"
  source: /note="Antisense Oligonucleotide"
  modified_base (1)..(1): bicyclic nucleic acid (BNA)
  modified_base (2)..(2): bicyclic nucleic acid (BNA)
  modified_base (10)..(10): bicyclic nucleic acid (BNA)
  modified_base (22)..(22): bicyclic nucleic acid (BNA)
  source: /note="3' tri-ethylene glycol (TEG)"
tcaaggaagauggcauuucuag

SEQ ID NO: 22318 - DNA, 22 bp, Artificial Sequence
  source: /note="Description of Artificial Sequence: Synthetic oligonucleotide"
  source: /note="Description of Combined DNA/RNA Molecule: Synthetic oligonucleotide"
  source: /note="Antisense Oligonucleotide"
  modified_base (1)..(1): bicyclic nucleic acid (BNA)
  modified_base (2)..(2): bicyclic nucleic acid (BNA)
  modified_base (10)..(10): bicyclic nucleic acid (BNA)
  modified_base (15)..(15): bicyclic nucleic acid (BNA)
  modified_base (22)..(22): bicyclic nucleic acid (BNA)
  source: /note="3' tri-ethylene glycol (TEG)"
tcaaggaagauggcauuucuag

SEQ ID NO: 22319 - DNA, 22 bp, Artificial Sequence
  source: /note="Description of Artificial Sequence: Synthetic oligonucleotide"
  source: /note="Description of Combined DNA/RNA Molecule: Synthetic oligonucleotide"
  source: /note="Antisense Oligonucleotide"
  modified_base (1)..(1): bicyclic nucleic acid (BNA)
  modified_base (2)..(2): bicyclic nucleic acid (BNA)
  modified_base (13)..(13): bicyclic nucleic acid (BNA)
  modified_base (22)..(22): bicyclic nucleic acid (BNA)
  source: /note="3' tri-ethylene glycol (TEG)"
tcaaggaagauggcauuucuag

SEQ ID NO: 22320 - DNA, 22 bp, Artificial Sequence
  source: /note="Description of Artificial Sequence: Synthetic oligonucleotide"
  source: /note="Description of Combined DNA/RNA Molecule: Synthetic oligonucleotide"
  source: /note="Antisense Oligonucleotide"
  modified_base (1)..(1): bicyclic nucleic acid (BNA)
  modified_base (2)..(2): bicyclic nucleic acid (BNA)
  modified_base (9)..(9): bicyclic nucleic acid (BNA)
  modified_base (22)..(22): bicyclic nucleic acid (BNA)
  source: /note="3' tri-ethylene glycol (TEG)"
tcaaggaagauggcauuucuag

SEQ ID NO: 22321 - DNA, 22 bp, Artificial Sequence
  source: /note="Description of Artificial Sequence: Synthetic oligonucleotide"
  source: /note="Description of Combined DNA/RNA Molecule: Synthetic oligonucleotide"
  source: /note="Antisense Oligonucleotide"
  modified_base (1)..(1): bicyclic nucleic acid (BNA)
  modified_base (2)..(2): bicyclic nucleic acid (BNA)
  modified_base (9)..(9): bicyclic nucleic acid (BNA)
  modified_base (13)..(13): bicyclic nucleic acid (BNA)
  modified_base (22)..(22): bicyclic nucleic acid (BNA)
  source: /note="3' tri-ethylene glycol (TEG)"
tcaaggaagauggcauuucuag

SEQ ID NO: 22322 - DNA, 22 bp, Artificial Sequence
  source: /note="Description of Artificial Sequence: Synthetic oligonucleotide"
  source: /note="Description of Combined DNA/RNA Molecule: Synthetic oligonucleotide"
  source: /note="Antisense Oligonucleotide"
  modified_base (1)..(1): bicyclic nucleic acid (BNA)
  modified_base (2)..(2): bicyclic nucleic acid (BNA)
  modified_base (5)..(5): bicyclic nucleic acid (BNA)
  modified_base (9)..(9): bicyclic nucleic acid (BNA)
  modified_base (13)..(13): bicyclic nucleic acid (BNA)
  modified_base (22)..(22): bicyclic nucleic acid (BNA)
  source: /note="3' tri-ethylene glycol (TEG)"
tcaaggaagauggcauuucuag

SEQ ID NO: 22323 - DNA, 22 bp, Artificial Sequence
  source: /note="Description of Artificial Sequence: Synthetic oligonucleotide"
  source: /note="Description of Combined DNA/RNA Molecule: Synthetic oligonucleotide"
  source: /note="Antisense Oligonucleotide"
  source: /note="5' tri-ethylene glycol (TEG)"
  modified_base (1)..(1): bicyclic nucleic acid (BNA)
  source: /note="3' tri-ethylene glycol (TEG)"
tcaaggaagauggcauuucuag

SEQ ID NO: 22324 - DNA, 22 bp, Artificial Sequence
  source: /note="Description of Artificial Sequence: Synthetic oligonucleotide"
  source: /note="Description of Combined DNA/RNA Molecule: Synthetic oligonucleotide"
  source: /note="Antisense Oligonucleotide"
  source: /note="5' tri-ethylene glycol (TEG)"
  modified_base (1)..(1): bicyclic nucleic acid (BNA)
  modified_base (2)..(2): bicyclic nucleic acid (BNA)
  source: /note="3' tri-ethylene glycol (TEG)"
tcaaggaagauggcauuucuag

SEQ ID NO: 22325 - DNA, 22 bp, Artificial Sequence
  source: /note="Description of Artificial Sequence: Synthetic oligonucleotide"
  source: /note="Description of Combined DNA/RNA Molecule: Synthetic oligonucleotide"
  source: /note="Antisense Oligonucleotide"
  source: /note="5' tri-ethylene glycol (TEG)"
  modified_base (1)..(1): bicyclic nucleic acid (BNA)
  modified_base (22)..(22): bicyclic nucleic acid (BNA)
  source: /note="3' tri-ethylene glycol (TEG)"
tcaaggaagauggcauuucuag

SEQ ID NO: 22326 - DNA, 22 bp, Artificial Sequence
  source: /note="Description of Artificial Sequence: Synthetic oligonucleotide"
  source: /note="Description of Combined DNA/RNA Molecule: Synthetic oligonucleotide"
  source: /note="Antisense Oligonucleotide"
  source: /note="5' tri-ethylene glycol (TEG)"
  modified_base (1)..(1): bicyclic nucleic acid (BNA)
  modified_base (2)..(2): bicyclic nucleic acid (BNA)
  modified_base (22)..(22): bicyclic nucleic acid (BNA)
  source: /note="3' tri-ethylene glycol (TEG)"
tcaaggaagauggcauuucuag

SEQ ID NO: 22327 - DNA, 22 bp, Artificial Sequence
  source: /note="Description of Artificial Sequence: Synthetic oligonucleotide"
  source: /note="Description of Combined DNA/RNA Molecule: Synthetic oligonucleotide"
  source: /note="Antisense Oligonucleotide"
  source: /note="5' tri-ethylene glycol (TEG)"
  modified_base (1)..(1): bicyclic nucleic acid (BNA)
  modified_base (2)..(2): bicyclic nucleic acid (BNA)
  modified_base (10)..(10): bicyclic nucleic acid (BNA)
  modified_base (22)..(22): bicyclic nucleic acid (BNA)
  source: /note="3' tri-ethylene glycol (TEG)"
tcaaggaagauggcauuucuag

SEQ ID NO: 22328 - DNA, 22 bp, Artificial Sequence
  source: /note="Description of Artificial Sequence: Synthetic oligonucleotide"
  source: /note="Description of Combined DNA/RNA Molecule: Synthetic oligonucleotide"
  source: /note="Antisense Oligonucleotide"
  source: /note="5' tri-ethylene glycol (TEG)"
  modified_base (1)..(1): bicyclic nucleic acid (BNA)
  modified_base (2)..(2): bicyclic nucleic acid (BNA)
  modified_base (10)..(10): bicyclic nucleic acid (BNA)
  modified_base (15)..(15): bicyclic nucleic acid (BNA)
  modified_base (22)..(22): bicyclic nucleic acid (BNA)
  source: /note="3' tri-ethylene glycol (TEG)"
tcaaggaagauggcauuucuag

SEQ ID NO: 22329 - DNA, 22 bp, Artificial Sequence
  source: /note="Description of Artificial Sequence: Synthetic oligonucleotide"
  source: /note="Description of Combined DNA/RNA Molecule: Synthetic oligonucleotide"
  source: /note="Antisense Oligonucleotide"
  source: /note="5' tri-ethylene glycol (TEG)"
  modified_base (1)..(1): bicyclic nucleic acid (BNA)
  modified_base (2)..(2): bicyclic nucleic acid (BNA)
  modified_base (13)..(13): bicyclic nucleic acid (BNA)
  modified_base (22)..(22): bicyclic nucleic acid (BNA)
  source: /note="3' tri-ethylene glycol (TEG)"
tcaaggaagauggcauuucuag

SEQ ID NO: 22330 - DNA, 22 bp, Artificial Sequence
  source: /note="Description of Artificial Sequence: Synthetic oligonucleotide"
  source: /note="Description of Combined DNA/RNA Molecule: Synthetic oligonucleotide"
  source: /note="Antisense Oligonucleotide"
  source: /note="5' tri-ethylene glycol (TEG)"
  modified_base (1)..(1): bicyclic nucleic acid (BNA)
  modified_base (2)..(2): bicyclic nucleic acid (BNA)
  modified_base (9)..(9): bicyclic nucleic acid (BNA)
  modified_base (22)..(22): bicyclic nucleic acid (BNA)
  source: /note="3' tri-ethylene glycol (TEG)"
tcaaggaagauggcauuucuag

SEQ ID NO: 22331 - DNA, 22 bp, Artificial Sequence
  source: /note="Description of Artificial Sequence: Synthetic oligonucleotide"
  source: /note="Description of Combined DNA/RNA Molecule: Synthetic oligonucleotide"
  source: /note="Antisense Oligonucleotide"
  source: /note="5' tri-ethylene glycol (TEG)"
  modified_base (1)..(1): bicyclic nucleic acid (BNA)
  modified_base (2)..(2): bicyclic nucleic acid (BNA)
  modified_base (9)..(9): bicyclic nucleic acid (BNA)
  modified_base (13)..(13): bicyclic nucleic acid (BNA)
  modified_base (22)..(22): bicyclic nucleic acid (BNA)
  source: /note="3' tri-ethylene glycol (TEG)"
tcaaggaagauggcauuucuag

SEQ ID NO: 22332 - DNA, 22 bp, Artificial Sequence
  source: /note="Description of Artificial Sequence: Synthetic oligonucleotide"
  source: /note="Description of Combined DNA/RNA Molecule: Synthetic oligonucleotide"
  source: /note="Antisense Oligonucleotide"
  source: /note="5' tri-ethylene glycol (TEG)"
  modified_base (1)..(1): bicyclic nucleic acid (BNA)
  modified_base (2)..(2): bicyclic nucleic acid (BNA)
  modified_base (5)..(5): bicyclic nucleic acid (BNA)
  modified_base (9)..(9): bicyclic nucleic acid (BNA)
  modified_base (13)..(13): bicyclic nucleic acid (BNA)
  modified_base (22)..(22): bicyclic nucleic acid (BNA)
  source: /note="3' tri-ethylene glycol (TEG)"
tcaaggaagauggcauuucuag

SEQ ID NO: 22333 - RNA, 18 nt, Artificial Sequence
  source: /note="Description of Artificial Sequence: Synthetic oligonucleotide"
  source: /note="RNA"
  modified_base (1)..(1): bicyclic nucleic acid (BNA)
  modified_base (2)..(2): bicyclic nucleic acid (BNA)
  modified_base (6)..(6): bicyclic nucleic acid (BNA)
  modified_base (9)..(9): 5-methyl modified nucleotide
  modified_base (13)..(13): 5-methyl modified nucleotide
  modified_base (14)..(14): 5-methyl modified nucleotide
  modified_base (18)..(18): 5-methyl bicyclic nucleic acid
gguaaguucuguccaagc

SEQ ID NO: 22334 - RNA, 18 nt, Artificial Sequence
  source: /note="Description of Artificial Sequence: Synthetic oligonucleotide"
  source: /note="RNA"
  modified_base (1)..(1): bicyclic nucleic acid (BNA)
  modified_base (9)..(9): 5-methyl modified nucleotide
  modified_base (13)..(13): 5-methyl modified nucleotide
  modified_base (14)..(14): 5-methyl modified nucleotide
  modified_base (18)..(18): 5-methyl bicyclic nucleic acid
gguaaguucuguccaagc

SEQ ID NO: 22335 - DNA, 18 bp, Artificial Sequence
  source: /note="Description of Artificial Sequence: Synthetic oligonucleotide"
  source: /note="Description of Combined DNA/RNA Molecule: Synthetic oligonucleotide"
  source: /note="DNA/RNA"
  modified_base (1)..(1): bicyclic nucleic acid (BNA)
  modified_base (2)..(2): bicyclic nucleic acid (BNA)
  modified_base (9)..(9): 5-methyl modified nucleotide
  modified_base (10)..(10): bicyclic nucleic acid (BNA)
  modified_base (13)..(13): 5-methyl modified nucleotide
  modified_base (14)..(14): 5-methyl modified nucleotide
  modified_base (18)..(18): 5-methyl bicyclic nucleic acid
gguaaguuctguccaagc

SEQ ID NO: 22336 - RNA, 18 nt, Artificial Sequence
  source: /note="Description of Artificial Sequence: Synthetic oligonucleotide"
  source: /note="RNA"
  modified_base (1)..(1): bicyclic nucleic acid (BNA)
  modified_base (2)..(2): bicyclic nucleic acid (BNA)
  modified_base (9)..(9): 5-methyl modified nucleotide
  modified_base (13)..(13): 5-methyl modified nucleotide
  modified_base (14)..(14): 5-methyl modified nucleotide
  modified_base (17)..(17): bicyclic nucleic acid (BNA)
  modified_base (18)..(18): 5-methyl bicyclic nucleic acid
gguaaguucuguccaagc

SEQ ID NO: 22337 - RNA, 18 nt, Artificial Sequence
  source: /note="Description of Artificial Sequence: Synthetic oligonucleotide"
  source: /note="RNA"
  modified_base (1)..(1): bicyclic nucleic acid (BNA)
  modified_base (2)..(2): bicyclic nucleic acid (BNA)
  modified_base (9)..(9): 5-methyl modified nucleotide
  modified_base (11)..(11): bicyclic nucleic acid (BNA)
  modified_base (13)..(13): 5-methyl modified nucleotide
  modified_base (14)..(14): 5-methyl modified nucleotide
  modified_base (18)..(18): 5-methyl bicyclic nucleic acid
gguaaguucuguccaagc

SEQ ID NO: 22338 - RNA, 18 nt, Artificial Sequence
  source: /note="Description of Artificial Sequence: Synthetic oligonucleotide"
  source: /note="RNA"
  modified_base (1)..(1): bicyclic nucleic acid (BNA)
  modified_base (2)..(2): bicyclic nucleic acid (BNA)
  modified_base (6)..(6): bicyclic nucleic acid (BNA)
  modified_base (9)..(9): 5-methyl modified nucleotide
  modified_base (11)..(11): bicyclic nucleic acid (BNA)
  modified_base (13)..(13): 5-methyl modified nucleotide
  modified_base (14)..(14): 5-methyl modified nucleotide
  modified_base (18)..(18): 5-methyl bicyclic nucleic acid
gguaaguucuguccaagc

SEQ ID NO: 22339 - RNA, 18 nt, Artificial Sequence
  source: /note="Description of Artificial Sequence: Synthetic oligonucleotide"
  source: /note="RNA"
  modified_base (1)..(1): bicyclic nucleic acid (BNA)
  modified_base (2)..(2): bicyclic nucleic acid (BNA)
  modified_base (6)..(6): bicyclic nucleic acid (BNA)
  modified_base (9)..(9): 5-methyl modified nucleotide
  modified_base (11)..(11): bicyclic nucleic acid (BNA)
  modified_base (13)..(13): 5-methyl modified nucleotide
  modified_base (14)..(14): 5-methyl modified nucleotide
  modified_base (17)..(17): bicyclic nucleic acid (BNA)
  modified_base (18)..(18): 5-methyl bicyclic nucleic acid
gguaaguucuguccaagc

SEQ ID NO: 22340 - RNA, 18 nt, Artificial Sequence
  source: /note="Description of Artificial Sequence: Synthetic oligonucleotide"
  source: /note="RNA"
  modified_base (1)..(1): bicyclic nucleic acid (BNA)
  modified_base (2)..(2): bicyclic nucleic acid (BNA)
  modified_base (9)..(9): 5-methyl modified nucleotide
  modified_base (13)..(13): 5-methyl modified nucleotide
  modified_base (14)..(14): 5-methyl modified nucleotide
  modified_base (18)..(18): 5-methyl bicyclic nucleic acid
gguaaguucuguccaagc

SEQ ID NO: 22341 - RNA, 18 nt, Artificial Sequence
  source: /note="Description of Artificial Sequence: Synthetic oligonucleotide"
  source: /note="RNA"
  modified_base (1)..(1): bicyclic nucleic acid (BNA)
  modified_base (6)..(6): bicyclic nucleic acid (BNA)
  modified_base (9)..(9): 5-methyl modified nucleotide
  modified_base (13)..(13): 5-methyl modified nucleotide
  modified_base (14)..(14): 5-methyl modified nucleotide
  modified_base (18)..(18): 5-methyl bicyclic nucleic acid
gguaaguucuguccaagc

SEQ ID NO: 22342 - RNA, 18 nt, Artificial Sequence
  source: /note="Description of Artificial Sequence: Synthetic oligonucleotide"
  source: /note="RNA"
  modified_base (1)..(1): bicyclic nucleic acid (BNA)
  modified_base (9)..(9): 5-methyl modified nucleotide
  modified_base (11)..(11): bicyclic nucleic acid (BNA)
  modified_base (13)..(13): 5-methyl modified nucleotide
  modified_base (14)..(14): 5-methyl modified nucleotide
  modified_base (18)..(18): 5-methyl bicyclic nucleic acid
gguaaguucuguccaagc

SEQ ID NO: 22343 - RNA, 18 nt, Artificial Sequence
  source: /note="Description of Artificial Sequence: Synthetic oligonucleotide"
  source: /note="RNA"
  modified_base (1)..(1): bicyclic nucleic acid (BNA)
  modified_base (9)..(9): 5-methyl bicyclic nucleic acid
  modified_base (13)..(13): 5-methyl modified nucleotide
  modified_base (14)..(14): 5-methyl modified nucleotide
  modified_base (18)..(18): 5-methyl bicyclic nucleic acid
gguaaguucuguccaagc

SEQ ID NO: 22344 - RNA, 18 nt, Artificial Sequence
  source: /note="Description of Artificial Sequence: Synthetic oligonucleotide"
  source: /note="RNA"
  modified_base (1)..(1): bicyclic nucleic acid (BNA)
  modified_base (9)..(9): 5-methyl modified nucleotide
  modified_base (13)..(13): 5-methyl modified nucleotide
  modified_base (14)..(14): 5-methyl modified nucleotide
  modified_base (18)..(18): 5-methyl bicyclic nucleic acid
gguaaguucuguccaagc

SEQ ID NO: 22345 - RNA, 18 nt, Artificial Sequence
  source: /note="Description of Artificial Sequence: Synthetic oligonucleotide"
  source: /note="RNA"
  source: /note="5' tri-ethylene glycol (TEG)"
  modified_base (1)..(1): bicyclic nucleic acid (BNA)
  modified_base (2)..(2): bicyclic nucleic acid (BNA)
  modified_base (6)..(6): bicyclic nucleic acid (BNA)
  modified_base (9)..(9): 5-methyl modified nucleotide
  modified_base (13)..(13): 5-methyl modified nucleotide
  modified_base (14)..(14): 5-methyl modified nucleotide
  modified_base (18)..(18): 5-methyl bicyclic nucleic acid
gguaaguucuguccaagc

SEQ ID NO: 22346 - RNA, 18 nt, Artificial Sequence
  source: /note="Description of Artificial Sequence: Synthetic oligonucleotide"
  source: /note="RNA"
  source: /note="5' tri-ethylene glycol (TEG)"
  modified_base (1)..(1): bicyclic nucleic acid (BNA)
  modified_base (9)..(9): 5-methyl modified nucleotide
  modified_base (13)..(13): 5-methyl modified nucleotide
  modified_base (14)..(14): 5-methyl modified nucleotide
  modified_base (18)..(18): 5-methyl bicyclic nucleic acid
gguaaguucuguccaagc

SEQ ID NO: 22347 - DNA, 18 bp, Artificial Sequence
  source: /note="Description of Artificial Sequence: Synthetic oligonucleotide"
  source: /note="Description of Combined DNA/RNA Molecule: Synthetic oligonucleotide"
  source: /note="DNA/RNA"
  source: /note="5' tri-ethylene glycol (TEG)"
  modified_base (1)..(1): bicyclic nucleic acid (BNA)
  modified_base (2)..(2): bicyclic nucleic acid (BNA)
  modified_base (9)..(9): 5-methyl modified nucleotide
  modified_base (10)..(10): bicyclic nucleic acid (BNA)
  modified_base (13)..(13): 5-methyl modified nucleotide
  modified_base (14)..(14): 5-methyl modified nucleotide
  modified_base (18)..(18): 5-methyl bicyclic nucleic acid
gguaaguuctguccaagc

SEQ ID NO: 22348 - RNA, 18 nt, Artificial Sequence
  source: /note="Description of Artificial Sequence: Synthetic oligonucleotide"
  source: /note="RNA"
  source: /note="5' tri-ethylene glycol (TEG)"
  modified_base (1)..(1): bicyclic nucleic acid (BNA)
  modified_base (2)..(2): bicyclic nucleic acid (BNA)
  modified_base (9)..(9): 5-methyl modified nucleotide
  modified_base (13)..(13): 5-methyl modified nucleotide
  modified_base (14)..(14): 5-methyl modified nucleotide
  modified_base (17)..(17): bicyclic nucleic acid (BNA)
  modified_base (18)..(18): 5-methyl bicyclic nucleic acid
gguaaguucuguccaagc

SEQ ID NO: 22349 - RNA, 18 nt, Artificial Sequence
  source: /note="Description of Artificial Sequence: Synthetic oligonucleotide"
  source: /note="RNA"
  source: /note="5' tri-ethylene glycol (TEG)"
  modified_base (1)..(1): bicyclic nucleic acid (BNA)
  modified_base (2)..(2): bicyclic nucleic acid (BNA)
  modified_base (9)..(9): 5-methyl modified nucleotide
  modified_base (11)..(11): bicyclic nucleic acid (BNA)
  modified_base (13)..(13): 5-methyl modified nucleotide
  modified_base (14)..(14): 5-methyl modified nucleotide
  modified_base (18)..(18): 5-methyl bicyclic nucleic acid
gguaaguucuguccaagc

SEQ ID NO: 22350 - RNA, 18 nt, Artificial Sequence
  source: /note="Description of Artificial Sequence: Synthetic oligonucleotide"
  source: /note="RNA"
  source: /note="5' tri-ethylene glycol (TEG)"
  modified_base (1)..(1): bicyclic nucleic acid (BNA)
  modified_base (2)..(2): bicyclic nucleic acid (BNA)
  modified_base (6)..(6): bicyclic nucleic acid (BNA)
  modified_base (9)..(9): 5-methyl modified nucleotide
  modified_base (11)..(11): bicyclic nucleic acid (BNA)
  modified_base (13)..(13): 5-methyl modified nucleotide
  modified_base (14)..(14): 5-methyl modified nucleotide
  modified_base (18)..(18): 5-methyl bicyclic nucleic acid
gguaaguucuguccaagc

SEQ ID NO: 22351 - RNA, 18 nt, Artificial Sequence
  source: /note="Description of Artificial Sequence: Synthetic oligonucleotide"
  source: /note="RNA"
  source: /note="5' tri-ethylene glycol (TEG)"
  modified_base (1)..(1): bicyclic nucleic acid (BNA)
  modified_base (2)..(2): bicyclic nucleic acid (BNA)
  modified_base (6)..(6): bicyclic nucleic acid (BNA)
  modified_base (9)..(9): 5-methyl modified nucleotide
  modified_base (11)..(11): bicyclic nucleic acid (BNA)
  modified_base (13)..(13): 5-methyl modified nucleotide
  modified_base (14)..(14): 5-methyl modified nucleotide
  modified_base (17)..(17): bicyclic nucleic acid (BNA)
  modified_base (18)..(18): 5-methyl bicyclic nucleic acid
gguaaguucuguccaagc

SEQ ID NO: 22352 - RNA, 18 nt, Artificial Sequence
  source: /note="Description of Artificial Sequence: Synthetic oligonucleotide"
  source: /note="RNA"
  source: /note="5' tri-ethylene glycol (TEG)"
  modified_base (1)..(1): bicyclic nucleic acid (BNA)
  modified_base (2)..(2): bicyclic nucleic acid (BNA)
  modified_base (9)..(9): 5-methyl modified nucleotide
  modified_base (13)..(13): 5-methyl modified nucleotide
  modified_base (14)..(14): 5-methyl modified nucleotide
  modified_base (18)..(18): 5-methyl bicyclic nucleic acid
gguaaguucuguccaagc

SEQ ID NO: 22353 - RNA, 18 nt, Artificial Sequence
  source: /note="Description of Artificial Sequence: Synthetic oligonucleotide"
  source: /note="RNA"
  source: /note="5' tri-ethylene glycol (TEG)"
  modified_base (1)..(1): bicyclic nucleic acid (BNA)
  modified_base (6)..(6): bicyclic nucleic acid (BNA)
  modified_base (9)..(9): 5-methyl modified nucleotide
  modified_base (13)..(13): 5-methyl modified nucleotide
  modified_base (14)..(14): 5-methyl modified nucleotide
  modified_base (18)..(18): 5-methyl bicyclic nucleic acid
gguaaguucuguccaagc

SEQ ID NO: 22354 - RNA, 18 nt, Artificial Sequence
  source: /note="Description of Artificial Sequence: Synthetic oligonucleotide"
  source: /note="RNA"
  source: /note="5' tri-ethylene glycol (TEG)"
  modified_base (1)..(1): bicyclic nucleic acid (BNA)
  modified_base (9)..(9): 5-methyl modified nucleotide
  modified_base (11)..(11): bicyclic nucleic acid (BNA)
  modified_base (13)..(13): 5-methyl modified nucleotide
  modified_base (14)..(14): 5-methyl modified nucleotide
  modified_base (18)..(18): 5-methyl bicyclic nucleic acid
gguaaguucuguccaagc

SEQ ID NO: 22355 - RNA, 18 nt, Artificial Sequence
  source: /note="Description of Artificial Sequence: Synthetic oligonucleotide"
  source: /note="RNA"
  source: /note="5' tri-ethylene glycol (TEG)"
  modified_base (1)..(1): bicyclic nucleic acid (BNA)
  modified_base (9)..(9): 5-methyl bicyclic nucleic acid
  modified_base (13)..(13): 5-methyl modified nucleotide
  modified_base (14)..(14): 5-methyl modified nucleotide
  modified_base (18)..(18): 5-methyl bicyclic nucleic acid
gguaaguucuguccaagc

SEQ ID NO: 22356 - RNA, 18 nt, Artificial Sequence
  source: /note="Description of Artificial Sequence: Synthetic oligonucleotide"
  source: /note="RNA"
  source: /note="5' tri-ethylene glycol (TEG)"
  modified_base (1)..(1): bicyclic nucleic acid (BNA)
  modified_base (9)..(9): 5-methyl modified nucleotide
  modified_base (13)..(13): 5-methyl modified nucleotide
  modified_base (14)..(14): 5-methyl modified nucleotide
  modified_base (18)..(18): 5-methyl bicyclic nucleic acid
gguaaguucuguccaagc

SEQ ID NO: 22357 - RNA, 18 nt, Artificial Sequence
  source: /note="Description of Artificial Sequence: Synthetic oligonucleotide"
  source: /note="RNA"
  modified_base (1)..(1): bicyclic nucleic acid (BNA)
  modified_base (2)..(2): bicyclic nucleic acid (BNA)
  modified_base (6)..(6): bicyclic nucleic acid (BNA)
  modified_base (9)..(9): 5-methyl modified nucleotide
  modified_base (13)..(13): 5-methyl modified nucleotide
  modified_base (14)..(14): 5-methyl modified nucleotide
  modified_base (18)..(18): 5-methyl bicyclic nucleic acid
  source: /note="3' tri-ethylene glycol (TEG)"
gguaaguucuguccaagc

SEQ ID NO: 22358 - RNA, 18 nt, Artificial Sequence
  source: /note="Description of Artificial Sequence: Synthetic oligonucleotide"
  source: /note="RNA"
  modified_base (1)..(1): bicyclic nucleic acid (BNA)
  modified_base (9)..(9): 5-methyl modified nucleotide
  modified_base (13)..(13): 5-methyl modified nucleotide
  modified_base (14)..(14): 5-methyl modified nucleotide
  modified_base (18)..(18): 5-methyl bicyclic nucleic acid
  source: /note="3' tri-ethylene glycol (TEG)"
gguaaguucuguccaagc

SEQ ID NO: 22359 - DNA, 18 bp, Artificial Sequence
  source: /note="Description of Artificial Sequence: Synthetic oligonucleotide"
  source: /note="Description of Combined DNA/RNA Molecule: Synthetic oligonucleotide"
  source: /note="DNA/RNA"
  modified_base (1)..(1): bicyclic nucleic acid (BNA)
  modified_base (2)..(2): bicyclic nucleic acid (BNA)
  modified_base (9)..(9): 5-methyl modified nucleotide
  modified_base (10)..(10): bicyclic nucleic acid (BNA)
  modified_base (13)..(13): 5-methyl modified nucleotide
  modified_base (14)..(14): 5-methyl modified nucleotide
  modified_base (18)..(18): 5-methyl bicyclic nucleic acid
  source: /note="3' tri-ethylene glycol (TEG)"
gguaaguuctguccaagc

SEQ ID NO: 22360 - RNA, 18 nt, Artificial Sequence
  source: /note="Description of Artificial Sequence: Synthetic oligonucleotide"
  source: /note="RNA"
  modified_base (1)..(1): bicyclic nucleic acid (BNA)
  modified_base (2)..(2): bicyclic nucleic acid (BNA)
  modified_base (9)..(9): 5-methyl modified nucleotide
  modified_base (13)..(13): 5-methyl modified nucleotide
  modified_base (14)..(14): 5-methyl modified nucleotide
  modified_base (17)..(17): bicyclic nucleic acid (BNA)
  modified_base (18)..(18): 5-methyl bicyclic nucleic acid
  source: /note="3' tri-ethylene glycol (TEG)"
gguaaguucuguccaagc

SEQ ID NO: 22361 - RNA, 18 nt, Artificial Sequence
  source: /note="Description of Artificial Sequence: Synthetic oligonucleotide"
  source: /note="RNA"
  modified_base (1)..(1): bicyclic nucleic acid (BNA)
  modified_base (2)..(2): bicyclic nucleic acid (BNA)
  modified_base (9)..(9): 5-methyl modified nucleotide
  modified_base (11)..(11): bicyclic nucleic acid (BNA)
  modified_base (13)..(13): 5-methyl modified nucleotide
  modified_base (14)..(14): 5-methyl modified nucleotide
  modified_base (18)..(18): 5-methyl bicyclic nucleic acid
  source: /note="3' tri-ethylene glycol (TEG)"
gguaaguucuguccaagc

SEQ ID NO: 22362 - RNA, 18 nt, Artificial Sequence
  source: /note="Description of Artificial Sequence: Synthetic oligonucleotide"
  source: /note="RNA"
  modified_base (1)..(1): bicyclic nucleic acid (BNA)
  modified_base (2)..(2): bicyclic nucleic acid (BNA)
  modified_base (6)..(6): bicyclic nucleic acid (BNA)
  modified_base (9)..(9): 5-methyl modified nucleotide
  modified_base (11)..(11): bicyclic nucleic acid (BNA)
  modified_base (13)..(13): 5-methyl modified nucleotide
  modified_base (14)..(14): 5-methyl modified nucleotide
  modified_base (18)..(18): 5-methyl bicyclic nucleic acid
  source: /note="3' tri-ethylene glycol (TEG)"
gguaaguucuguccaagc

SEQ ID NO: 22363 - RNA, 18 nt, Artificial Sequence
  source: /note="Description of Artificial Sequence: Synthetic oligonucleotide"
  source: /note="RNA"
  modified_base (1)..(1): bicyclic nucleic acid (BNA)
  modified_base (2)..(2): bicyclic nucleic acid (BNA)
  modified_base (6)..(6): bicyclic nucleic acid (BNA)
  modified_base (9)..(9): 5-methyl modified nucleotide
  modified_base (11)..(11): bicyclic nucleic acid (BNA)
  modified_base (13)..(13): 5-methyl modified nucleotide
  modified_base (14)..(14): 5-methyl modified nucleotide
  modified_base (17)..(17): bicyclic nucleic acid (BNA)
  modified_base (18)..(18): 5-methyl bicyclic nucleic acid
  source: /note="3' tri-ethylene glycol (TEG)"
gguaaguucuguccaagc

SEQ ID NO: 22364 - RNA, 18 nt, Artificial Sequence
  source: /note="Description of Artificial Sequence: Synthetic oligonucleotide"
  source: /note="RNA"
  modified_base (1)..(1): bicyclic nucleic acid (BNA)
  modified_base (2)..(2): bicyclic nucleic acid (BNA)
  modified_base (9)..(9): 5-methyl modified nucleotide
  modified_base (13)..(13): 5-methyl modified nucleotide
  modified_base (14)..(14): 5-methyl modified nucleotide
  modified_base (18)..(18): 5-methyl bicyclic nucleic acid
  source: /note="3' tri-ethylene glycol (TEG)"
gguaaguucuguccaagc

SEQ ID NO: 22365 - RNA, 18 nt, Artificial Sequence
  source: /note="Description of Artificial Sequence: Synthetic oligonucleotide"
  source: /note="RNA"
  modified_base (1)..(1): bicyclic nucleic acid (BNA)
  modified_base (6)..(6): bicyclic nucleic acid (BNA)
  modified_base (9)..(9): 5-methyl modified nucleotide
  modified_base (13)..(13): 5-methyl modified nucleotide
  modified_base (14)..(14): 5-methyl modified nucleotide
  modified_base (18)..(18): 5-methyl bicyclic nucleic acid
  source: /note="3' tri-ethylene glycol (TEG)"
gguaaguucuguccaagc

SEQ ID NO: 22366 - RNA, 18 nt, Artificial Sequence
  source: /note="Description of Artificial Sequence: Synthetic oligonucleotide"
  source: /note="RNA"
  modified_base (1)..(1): bicyclic nucleic acid (BNA)
  modified_base (9)..(9): 5-methyl modified nucleotide
  modified_base (11)..(11): bicyclic nucleic acid (BNA)
  modified_base (13)..(13): 5-methyl modified nucleotide
  modified_base (14)..(14): 5-methyl modified nucleotide
  modified_base (18)..(18): 5-methyl bicyclic nucleic acid
  source: /note="3' tri-ethylene glycol (TEG)"
gguaaguucuguccaagc

SEQ ID NO: 22367 - RNA, 18 nt, Artificial Sequence
  source: /note="Description of Artificial Sequence: Synthetic oligonucleotide"
  source: /note="RNA"
  modified_base (1)..(1): bicyclic nucleic acid (BNA)
  modified_base (9)..(9): 5-methyl bicyclic nucleic acid
  modified_base (13)..(13): 5-methyl modified nucleotide
  modified_base (14)..(14): 5-methyl modified nucleotide
  modified_base (18)..(18): 5-methyl bicyclic nucleic acid
  source: /note="3' tri-ethylene glycol (TEG)"
gguaaguucuguccaagc

SEQ ID NO: 22368 - RNA, 18 nt, Artificial Sequence
  source: /note="Description of Artificial Sequence: Synthetic oligonucleotide"
  source: /note="RNA"
  modified_base (1)..(1): bicyclic nucleic acid (BNA)
  modified_base (9)..(9): 5-methyl modified nucleotide
  modified_base (13)..(13): 5-methyl modified nucleotide
  modified_base (14)..(14): 5-methyl modified nucleotide
  modified_base (18)..(18): 5-methyl bicyclic nucleic acid
  source: /note="3' tri-ethylene glycol (TEG)"
gguaaguucuguccaagc

SEQ ID NO: 22369 - RNA, 18 nt, Artificial Sequence
  source: /note="Description of Artificial Sequence: Synthetic oligonucleotide"
  source: /note="RNA"
  source: /note="5' tri-ethylene glycol (TEG)"
  modified_base (1)..(1): bicyclic nucleic acid (BNA)
  modified_base (2)..(2): bicyclic nucleic acid (BNA)
  modified_base (6)..(6): bicyclic nucleic acid (BNA)
  modified_base (9)..(9): 5-methyl modified nucleotide
  modified_base (13)..(13): 5-methyl modified nucleotide
  modified_base (14)..(14): 5-methyl modified nucleotide
  modified_base (18)..(18): 5-methyl bicyclic nucleic acid
  source: /note="3' tri-ethylene glycol (TEG)"
gguaaguucuguccaagc

SEQ ID NO: 22370 - RNA, 18 nt, Artificial Sequence
  source: /note="Description of Artificial Sequence: Synthetic oligonucleotide"
  source: /note="RNA"
  source: /note="5' tri-ethylene glycol (TEG)"
  modified_base (1)..(1): bicyclic nucleic acid (BNA)
  modified_base (9)..(9): 5-methyl modified nucleotide
  modified_base (13)..(13): 5-methyl modified nucleotide
  modified_base (14)..(14): 5-methyl modified nucleotide
  modified_base (18)..(18): 5-methyl bicyclic nucleic acid
  source: /note="3' tri-ethylene glycol (TEG)"
gguaaguucuguccaagc

SEQ ID NO: 22371 - DNA, 18 bp, Artificial Sequence
  source: /note="Description of Artificial Sequence: Synthetic oligonucleotide"
  source: /note="Description of Combined DNA/RNA Molecule: Synthetic oligonucleotide"
  source: /note="DNA/RNA"
  source: /note="5' tri-ethylene glycol (TEG)"
  modified_base (1)..(1): bicyclic nucleic acid (BNA)
  modified_base (2)..(2): bicyclic nucleic acid (BNA)
  modified_base (9)..(9): 5-methyl modified nucleotide
  modified_base (10)..(10): bicyclic nucleic acid (BNA)
  modified_base (13)..(13): 5-methyl modified nucleotide
  modified_base (14)..(14): 5-methyl modified nucleotide
  modified_base (18)..(18): 5-methyl bicyclic nucleic acid
  source: /note="3' tri-ethylene glycol (TEG)"
gguaaguuctguccaagc

SEQ ID NO: 22372 - RNA, 18 nt, Artificial Sequence
  source: /note="Description of Artificial Sequence: Synthetic oligonucleotide"
  source: /note="RNA"
  source: /note="5' tri-ethylene glycol (TEG)"
  modified_base (1)..(1): bicyclic nucleic acid (BNA)
  modified_base (2)..(2): bicyclic nucleic acid (BNA)
  modified_base (9)..(9): 5-methyl modified nucleotide
  modified_base (13)..(13): 5-methyl modified nucleotide
  modified_base (14)..(14): 5-methyl modified nucleotide
  modified_base (17)..(17): bicyclic nucleic acid (BNA)
  modified_base (18)..(18): 5-methyl bicyclic nucleic acid
  source: /note="3' tri-ethylene glycol (TEG)"
gguaaguucuguccaagc

SEQ ID NO: 22373 - RNA, 18 nt, Artificial Sequence
  source: /note="Description of Artificial Sequence: Synthetic oligonucleotide"
  source: /note="RNA"
  source: /note="5' tri-ethylene glycol (TEG)"
  modified_base (1)..(1): bicyclic nucleic acid (BNA)
  modified_base (2)..(2): bicyclic nucleic acid (BNA)
  modified_base (9)..(9): 5-methyl modified nucleotide
  modified_base (11)..(11): bicyclic nucleic acid (BNA)
  modified_base (13)..(13): 5-methyl modified nucleotide
  modified_base (14)..(14): 5-methyl modified nucleotide
  modified_base (18)..(18): 5-methyl bicyclic nucleic acid
  source: /note="3' tri-ethylene glycol (TEG)"
gguaaguucuguccaagc

SEQ ID NO: 22374 - RNA, 18 nt, Artificial Sequence
  source: /note="Description of Artificial Sequence: Synthetic oligonucleotide"
  source: /note="RNA"
  source: /note="5' tri-ethylene glycol (TEG)"
  modified_base (1)..(1): bicyclic nucleic acid (BNA)
  modified_base (2)..(2): bicyclic nucleic acid (BNA)
  modified_base (6)..(6): bicyclic nucleic acid (BNA)
  modified_base (9)..(9): 5-methyl modified nucleotide
  modified_base (11)..(11): bicyclic nucleic acid (BNA)
  modified_base (13)..(13): 5-methyl modified nucleotide
  modified_base (14)..(14): 5-methyl modified nucleotide
  modified_base (18)..(18): 5-methyl bicyclic nucleic acid
  source: /note="3' tri-ethylene glycol (TEG)"
gguaaguucuguccaagc

SEQ ID NO: 22375 - RNA, 18 nt, Artificial Sequence
  source: /note="Description of Artificial Sequence: Synthetic oligonucleotide"
  source: /note="RNA"
  source: /note="5' tri-ethylene glycol (TEG)"
  modified_base (1)..(1): bicyclic nucleic acid (BNA)
  modified_base (2)..(2): bicyclic nucleic acid (BNA)
  modified_base (6)..(6): bicyclic nucleic acid (BNA)
  modified_base (9)..(9): 5-methyl modified nucleotide
  modified_base (11)..(11): bicyclic nucleic acid (BNA)
  modified_base (13)..(13): 5-methyl modified nucleotide
  modified_base (14)..(14): 5-methyl modified nucleotide
  modified_base (17)..(17): bicyclic nucleic acid (BNA)
  modified_base (18)..(18): 5-methyl bicyclic nucleic acid
  source: /note="3' tri-ethylene glycol (TEG)"
gguaaguucuguccaagc

SEQ ID NO: 22376 - RNA, 18 nt, Artificial Sequence
  source: /note="Description of Artificial Sequence: Synthetic oligonucleotide"
  source: /note="RNA"
  source: /note="5' tri-ethylene glycol (TEG)"
  modified_base (1)..(1): bicyclic nucleic acid (BNA)
  modified_base (2)..(2): bicyclic nucleic acid (BNA)
  modified_base (9)..(9): 5-methyl modified nucleotide
  modified_base (13)..(13): 5-methyl modified nucleotide
  modified_base (14)..(14): 5-methyl modified nucleotide
  modified_base (18)..(18): 5-methyl bicyclic nucleic acid
  source: /note="3' tri-ethylene glycol (TEG)"
gguaaguucuguccaagc

SEQ ID NO: 22377 - RNA, 18 nt, Artificial Sequence
  source: /note="Description of Artificial Sequence: Synthetic oligonucleotide"
  source: /note="RNA"
  source: /note="5' tri-ethylene glycol (TEG)"
  modified_base (1)..(1): bicyclic nucleic acid (BNA)
  modified_base (6)..(6): bicyclic nucleic acid (BNA)
  modified_base (9)..(9): 5-methyl modified nucleotide
  modified_base (13)..(13): 5-methyl modified nucleotide
  modified_base (14)..(14): 5-methyl modified nucleotide
  modified_base (18)..(18): 5-methyl bicyclic nucleic acid
  source: /note="3' tri-ethylene glycol (TEG)"
gguaaguucuguccaagc

SEQ ID NO: 22378 - RNA, 18 nt, Artificial Sequence
  source: /note="Description of Artificial Sequence: Synthetic oligonucleotide"
  source: /note="RNA"
  source: /note="5' tri-ethylene glycol (TEG)"
  modified_base (1)..(1): bicyclic nucleic acid (BNA)
  modified_base (9)..(9): 5-methyl modified nucleotide
  modified_base (11)..(11): bicyclic nucleic acid (BNA)
  modified_base (13)..(13): 5-methyl modified nucleotide
  modified_base (14)..(14): 5-methyl modified nucleotide
  modified_base (18)..(18): 5-methyl bicyclic nucleic acid
  source: /note="3' tri-ethylene glycol (TEG)"
gguaaguucuguccaagc

SEQ ID NO: 22379 - RNA, 18 nt, Artificial Sequence
  source: /note="Description of Artificial Sequence: Synthetic oligonucleotide"
  source: /note="RNA"
  source: /note="5' tri-ethylene glycol (TEG)"
  modified_base (1)..(1): bicyclic nucleic acid (BNA)
  modified_base (9)..(9): 5-methyl bicyclic nucleic acid
  modified_base (13)..(13): 5-methyl modified nucleotide
  modified_base (14)..(14): 5-methyl modified nucleotide
  modified_base (18)..(18): 5-methyl bicyclic nucleic acid
  source: /note="3' tri-ethylene glycol (TEG)"
gguaaguucuguccaagc

SEQ ID NO: 22380 - RNA, 18 nt, Artificial Sequence
  source: /note="Description of Artificial Sequence: Synthetic oligonucleotide"
  source: /note="RNA"
  source: /note="5' tri-ethylene glycol (TEG)"
  modified_base (1)..(1): bicyclic nucleic acid (BNA)
  modified_base (9)..(9): 5-methyl modified nucleotide
  modified_base (13)..(13): 5-methyl modified nucleotide
  modified_base (14)..(14): 5-methyl modified nucleotide
  modified_base (18)..(18): 5-methyl bicyclic nucleic acid
  source: /note="3' tri-ethylene glycol (TEG)"
gguaaguucuguccaagc

SEQ ID NO: 22381 - DNA, 20 bp, Artificial Sequence
  source: /note="Description of Artificial Sequence: Synthetic oligonucleotide"
  source: /note="Description of Combined DNA/RNA Molecule: Synthetic oligonucleotide"
  source: /note="DNA/RNA"
  modified_base (1)..(1): bicyclic nucleic acid (BNA)
  modified_base (2)..(2): 5-methyl modified nucleotide
  modified_base (14)..(14): 5-methyl modified nucleotide
  modified_base (19)..(19): 5-methyl modified nucleotide
tcaaggaagauggcauuucu

SEQ ID NO: 22382 - RNA, 20 nt, Artificial Sequence
  source: /note="Description of Artificial Sequence: Synthetic oligonucleotide"
  source: /note="RNA"
  modified_base (2)..(2): 5-methyl modified nucleotide
  modified_base (5)..(5): bicyclic nucleic acid (BNA)
  modified_base (14)..(14): 5-methyl modified nucleotide
  modified_base (19)..(19): 5-methyl modified nucleotide
ucaaggaagauggcauuucu

SEQ ID NO: 22383 - DNA, 20 bp, Artificial Sequence
  source: /note="Description of Artificial Sequence: Synthetic oligonucleotide"
  source: /note="Description of Combined DNA/RNA Molecule: Synthetic oligonucleotide"
  source: /note="DNA/RNA"
  modified_base (1)..(1): bicyclic nucleic acid (BNA)
  modified_base (2)..(2): 5-methyl modified nucleotide
  modified_base (14)..(14): 5-methyl modified nucleotide
  modified_base (19)..(19): 5-methyl modified nucleotide
  modified_base (20)..(20): bicyclic nucleic acid (BNA)
tcaaggaagauggcauuuct

SEQ ID NO: 22384 - DNA, 20 bp, Artificial Sequence
  source: /note="Description of Artificial Sequence: Synthetic oligonucleotide"
  source: /note="Description of Combined DNA/RNA Molecule: Synthetic oligonucleotide"
  source: /note="DNA/RNA"
  modified_base (1)..(1): bicyclic nucleic acid (BNA)
  modified_base (2)..(2): 5-methyl bicyclic nucleic acid
  modified_base (14)..(14): 5-methyl modified nucleotide
  modified_base (19)..(19): 5-methyl modified nucleotide
tcaaggaagauggcauuucu

SEQ ID NO: 22385 - DNA, 20 bp, Artificial Sequence
  source: /note="Description of Artificial Sequence: Synthetic oligonucleotide"
  source: /note="Description of Combined DNA/RNA Molecule: Synthetic oligonucleotide"
  source: /note="DNA/RNA"
  modified_base (1)..(1): bicyclic nucleic acid (BNA)
  modified_base (2)..(2): 5-methyl bicyclic nucleic acid
  modified_base (13)..(13): bicyclic nucleic acid (BNA)
  modified_base (14)..(14): 5-methyl modified nucleotide
  modified_base (19)..(19): 5-methyl modified nucleotide
tcaaggaagauggcauuucu

SEQ ID NO: 22386 - DNA, 20 bp, Artificial Sequence
  source: /note="Description of Artificial Sequence: Synthetic oligonucleotide"
  source: /note="Description of Combined DNA/RNA Molecule: Synthetic oligonucleotide"
  source: /note="DNA/RNA"
  modified_base (1)..(1): bicyclic nucleic acid (BNA)
  modified_base (2)..(2): 5-methyl bicyclic nucleic acid
  modified_base (14)..(14): 5-methyl modified nucleotide
  modified_base (19)..(19): 5-methyl modified nucleotide
  modified_base (20)..(20): bicyclic nucleic acid (BNA)
tcaaggaagauggcauuuct

SEQ ID NO: 22387 - DNA, 20 bp, Artificial Sequence
  source: /note="Description of Artificial Sequence: Synthetic oligonucleotide"
  source: /note="Description of Combined DNA/RNA Molecule: Synthetic oligonucleotide"
  source: /note="DNA/RNA"
  modified_base (1)..(1): bicyclic nucleic acid (BNA)
  modified_base (2)..(2): 5-methyl bicyclic nucleic acid
  modified_base (10)..(10): bicyclic nucleic acid (BNA)
  modified_base (14)..(14): 5-methyl modified nucleotide
  modified_base (19)..(19): 5-methyl modified nucleotide
  modified_base (20)..(20): bicyclic nucleic acid (BNA)
tcaaggaagauggcauuuct

SEQ ID NO: 22388 - DNA, 20 bp, Artificial Sequence
  source: /note="Description of Artificial Sequence: Synthetic oligonucleotide"
  source: /note="Description of Combined DNA/RNA Molecule: Synthetic oligonucleotide"
  source: /note="DNA/RNA"
  modified_base (1)..(1): bicyclic nucleic acid (BNA)
  modified_base (2)..(2): 5-methyl modified nucleotide
  modified_base (7)..(7): bicyclic nucleic acid (BNA)
  modified_base (14)..(14): 5-methyl modified nucleotide
  modified_base (15)..(15): bicyclic nucleic acid (BNA)
  modified_base (19)..(19): 5-methyl modified nucleotide
  modified_base (20)..(20): bicyclic nucleic acid (BNA)
tcaaggaagauggcauuuct

SEQ ID NO: 22389 - DNA, 20 bp, Artificial Sequence
  source: /note="Description of Artificial Sequence: Synthetic oligonucleotide"
  source: /note="Description of Combined DNA/RNA Molecule: Synthetic oligonucleotide"
  source: /note="DNA/RNA"
  modified_base (1)..(1): bicyclic nucleic acid (BNA)
  modified_base (2)..(2): 5-methyl bicyclic nucleic acid
  modified_base (7)..(7): bicyclic nucleic acid (BNA)
  modified_base (14)..(14): 5-methyl modified nucleotide
  modified_base (15)..(15): bicyclic nucleic acid (BNA)
  modified_base (19)..(19): 5-methyl modified nucleotide
  modified_base (20)..(20): bicyclic nucleic acid (BNA)
tcaaggaagauggcauuuct

SEQ ID NO: 22390 - DNA, 20 bp, Artificial Sequence
  source: /note="Description of Artificial Sequence: Synthetic oligonucleotide"
  source: /note="Description of Combined DNA/RNA Molecule: Synthetic oligonucleotide"
  source: /note="DNA/RNA"
  modified_base (1)..(1): bicyclic nucleic acid (BNA)
  modified_base (2)..(2): 5-methyl bicyclic nucleic acid
  modified_base (7)..(7): bicyclic nucleic acid (BNA)
  modified_base (11)..(11): bicyclic nucleic acid (BNA)
  modified_base (14)..(14): 5-methyl modified nucleotide
  modified_base (15)..(15): bicyclic nucleic acid (BNA)
  modified_base (19)..(19): 5-methyl modified nucleotide
  modified_base (20)..(20): bicyclic nucleic acid (BNA)
tcaaggaagatggcauuuct

SEQ ID NO: 22391 - DNA, 20 bp, Artificial Sequence
  source: /note="Description of Artificial Sequence: Synthetic oligonucleotide"
  source: /note="Description of Combined DNA/RNA Molecule: Synthetic oligonucleotide"
  source: /note="DNA/RNA"
  modified_base (1)..(1): bicyclic nucleic acid (BNA)
  modified_base (2)..(2): 5-methyl bicyclic nucleic acid
  modified_base (6)..(6): bicyclic nucleic acid (BNA)
  modified_base (10)..(10): bicyclic nucleic acid (BNA)
  modified_base (14)..(14): 5-methyl modified nucleotide
  modified_base (15)..(15): bicyclic nucleic acid (BNA)
  modified_base (19)..(19): 5-methyl modified nucleotide
  modified_base (20)..(20): bicyclic nucleic acid (BNA)
tcaaggaagauggcauuuct

SEQ ID NO: 22392 - DNA, 20 bp, Artificial Sequence
  source: /note="Description of Artificial Sequence: Synthetic oligonucleotide"
  source: /note="Description of Combined DNA/RNA Molecule: Synthetic oligonucleotide"
  source: /note="DNA/RNA"
  modified_base (1)..(1): bicyclic nucleic acid (BNA)
  modified_base (2)..(2): 5-methyl modified nucleotide
  modified_base (9)..(9): bicyclic nucleic acid (BNA)
  modified_base (14)..(14): 5-methyl modified nucleotide
  modified_base (19)..(19): 5-methyl modified nucleotide
  modified_base (20)..(20): bicyclic nucleic acid (BNA)
tcaaggaagauggcauuuct

SEQ ID NO: 22393 - DNA, 20 bp, Artificial Sequence
  source: /note="Description of Artificial Sequence: Synthetic oligonucleotide"
  source: /note="Description of Combined DNA/RNA Molecule: Synthetic oligonucleotide"
  source: /note="DNA/RNA"
  modified_base (1)..(1): bicyclic nucleic acid (BNA)
  modified_base (2)..(2): 5-methyl modified nucleotide
  modified_base (13)..(13): bicyclic nucleic acid (BNA)
  modified_base (14)..(14): 5-methyl modified nucleotide
  modified_base (19)..(19): 5-methyl modified nucleotide
  modified_base (20)..(20): bicyclic nucleic acid (BNA)
tcaaggaagauggcauuuct

SEQ ID NO: 22394 - DNA, 20 bp, Artificial Sequence
  source: /note="Description of Artificial Sequence: Synthetic oligonucleotide"
  source: /note="Description of Combined DNA/RNA Molecule: Synthetic oligonucleotide"
  source: /note="DNA/RNA"
  modified_base (1)..(1): bicyclic nucleic acid (BNA)
  modified_base (2)..(2): 5-methyl modified nucleotide
  modified_base (9)..(9): bicyclic nucleic acid (BNA)
  modified_base (13)..(13): bicyclic nucleic acid (BNA)
  modified_base (14)..(14): 5-methyl modified nucleotide
  modified_base (19)..(19): 5-methyl modified nucleotide
  modified_base (20)..(20): bicyclic nucleic acid (BNA)
tcaaggaagauggcauuuct

SEQ ID NO: 22395 - DNA, 20 bp, Artificial Sequence
  source: /note="Description of Artificial Sequence: Synthetic oligonucleotide"
  source: /note="Description of Combined DNA/RNA Molecule: Synthetic oligonucleotide"
  source: /note="DNA/RNA"
  modified_base (1)..(1): bicyclic nucleic acid (BNA)
  modified_base (2)..(2): 5-methyl modified nucleotide
  modified_base (6)..(6): bicyclic nucleic acid (BNA)
  modified_base (9)..(9): bicyclic nucleic acid (BNA)
  modified_base (13)..(13): bicyclic nucleic acid (BNA)
  modified_base (14)..(14): 5-methyl modified nucleotide
  modified_base (19)..(19): 5-methyl modified nucleotide
  modified_base (20)..(20): bicyclic nucleic acid (BNA)
tcaaggaagauggcauuuct

SEQ ID NO: 22396 - DNA, 20 bp, Artificial Sequence
  source: /note="Description of Artificial Sequence: Synthetic oligonucleotide"
  source: /note="Description of Combined DNA/RNA Molecule: Synthetic oligonucleotide"
  source: /note="DNA/RNA"
  source: /note="5' tri-ethylene glycol (TEG)"
  modified_base (1)..(1): bicyclic nucleic acid (BNA)
  modified_base (2)..(2): 5-methyl modified nucleotide
  modified_base (14)..(14): 5-methyl modified nucleotide
  modified_base (19)..(19): 5-methyl modified nucleotide
tcaaggaagauggcauuucu

SEQ ID NO: 22397 - RNA, 20 nt, Artificial Sequence
  source: /note="Description of Artificial Sequence: Synthetic oligonucleotide"
  source: /note="RNA"
  source: /note="5' tri-ethylene glycol (TEG)"
  modified_base (2)..(2): 5-methyl modified nucleotide
  modified_base (5)..(5): bicyclic nucleic acid (BNA)
  modified_base (14)..(14): 5-methyl modified nucleotide
  modified_base (19)..(19): 5-methyl modified nucleotide
ucaaggaagauggcauuucu

SEQ ID NO: 22398 - DNA, 20 bp, Artificial Sequence
  source: /note="Description of Artificial Sequence: Synthetic oligonucleotide"
  source: /note="Description of Combined DNA/RNA Molecule: Synthetic oligonucleotide"
  source: /note="DNA/RNA"
  source: /note="5' tri-ethylene glycol (TEG)"
  modified_base (1)..(1): bicyclic nucleic acid (BNA)
  modified_base (2)..(2): 5-methyl modified nucleotide
  modified_base (14)..(14): 5-methyl modified nucleotide
  modified_base (19)..(19): 5-methyl modified nucleotide
  modified_base (20)..(20): bicyclic nucleic acid (BNA)
tcaaggaagauggcauuuct

SEQ ID NO: 22399 - DNA, 20 bp, Artificial Sequence
  source: /note="Description of Artificial Sequence: Synthetic oligonucleotide"
  source: /note="Description of Combined DNA/RNA Molecule: Synthetic oligonucleotide"
  source: /note="DNA/RNA"
  source: /note="5' tri-ethylene glycol (TEG)"
  modified_base (1)..(1): bicyclic nucleic acid (BNA)
  modified_base (2)..(2): 5-methyl bicyclic nucleic acid
  modified_base (14)..(14): 5-methyl modified nucleotide
  modified_base (19)..(19): 5-methyl modified nucleotide
tcaaggaagauggcauuucu

SEQ ID NO: 22400 - DNA, 20 bp, Artificial Sequence
  source: /note="Description of Artificial Sequence: Synthetic oligonucleotide"
  source: /note="Description of Combined DNA/RNA Molecule: Synthetic oligonucleotide"
  source: /note="DNA/RNA"
  source: /note="5' tri-ethylene glycol (TEG)"
  modified_base (1)..(1): bicyclic nucleic acid (BNA)
  modified_base (2)..(2): 5-methyl bicyclic nucleic acid
  modified_base (13)..(13): bicyclic nucleic acid (BNA)
  modified_base (14)..(14): 5-methyl modified nucleotide
  modified_base (19)..(19): 5-methyl modified nucleotide
tcaaggaagauggcauuucu

SEQ ID NO: 22401 - DNA, 20 bp, Artificial Sequence
  source: /note="Description of Artificial Sequence: Synthetic oligonucleotide"
  source: /note="Description of Combined DNA/RNA Molecule: Synthetic oligonucleotide"
  source: /note="DNA/RNA"
  source: /note="5' tri-ethylene glycol (TEG)"
  modified_base (1)..(1): bicyclic nucleic acid (BNA)
  modified_base (2)..(2): 5-methyl bicyclic nucleic acid
  modified_base (14)..(14): 5-methyl modified nucleotide
  modified_base (19)..(19): 5-methyl modified nucleotide
  modified_base (20)..(20): bicyclic nucleic acid (BNA)
tcaaggaagauggcauuuct

SEQ ID NO: 22402 - DNA, 20 bp, Artificial Sequence
  source: /note="Description of Artificial Sequence: Synthetic oligonucleotide"
  source: /note="Description of Combined DNA/RNA Molecule: Synthetic oligonucleotide"
  source: /note="DNA/RNA"
  source: /note="5' tri-ethylene glycol (TEG)"
  modified_base (1)..(1): bicyclic nucleic acid (BNA)
  modified_base (2)..(2): 5-methyl bicyclic nucleic acid
  modified_base (10)..(10): bicyclic nucleic acid (BNA)
  modified_base (14)..(14): 5-methyl modified nucleotide
  modified_base (19)..(19): 5-methyl modified nucleotide
  modified_base (20)..(20): bicyclic nucleic acid (BNA)
tcaaggaagauggcauuuct

SEQ ID NO: 22403 - DNA, 20 bp, Artificial Sequence
  source: /note="Description of Artificial Sequence: Synthetic oligonucleotide"
  source: /note="Description of Combined DNA/RNA Molecule: Synthetic oligonucleotide"
  source: /note="DNA/RNA"
  source: /note="5' tri-ethylene glycol (TEG)"
  modified_base (1)..(1): bicyclic nucleic acid (BNA)
  modified_base (2)..(2): 5-methyl modified nucleotide
  modified_base (7)..(7): bicyclic nucleic acid (BNA)
  modified_base (14)..(14): 5-methyl modified nucleotide
  modified_base (15)..(15): bicyclic nucleic acid (BNA)
  modified_base (19)..(19): 5-methyl modified nucleotide
  modified_base (20)..(20): bicyclic nucleic acid (BNA)
tcaaggaagauggcauuuct

SEQ ID NO: 22404 - DNA, 20 bp, Artificial Sequence
  source: /note="Description of Artificial Sequence: Synthetic oligonucleotide"
  source: /note="Description of Combined DNA/RNA Molecule: Synthetic oligonucleotide"
  source: /note="DNA/RNA"
  source: /note="5' tri-ethylene glycol (TEG)"
  modified_base (1)..(1): bicyclic nucleic acid (BNA)
  modified_base (2)..(2): 5-methyl bicyclic nucleic acid
  modified_base (7)..(7): bicyclic nucleic acid (BNA)
  modified_base (14)..(14): 5-methyl modified nucleotide
  modified_base (15)..(15): bicyclic nucleic acid (BNA)
  modified_base (19)..(19): 5-methyl modified nucleotide
  modified_base (20)..(20): bicyclic nucleic acid (BNA)
tcaaggaagauggcauuuct

SEQ ID NO: 22405 - DNA, 20 bp, Artificial Sequence
  source: /note="Description of Artificial Sequence: Synthetic oligonucleotide"
  source: /note="Description of Combined DNA/RNA Molecule: Synthetic oligonucleotide"
  source: /note="DNA/RNA"
  source: /note="5' tri-ethylene glycol (TEG)"
  modified_base (1)..(1): bicyclic nucleic acid (BNA)
  modified_base (2)..(2): 5-methyl bicyclic nucleic acid
  modified_base (7)..(7): bicyclic nucleic acid (BNA)
  modified_base (11)..(11): bicyclic nucleic acid (BNA)
  modified_base (14)..(14): 5-methyl modified nucleotide
  modified_base (15)..(15): bicyclic nucleic acid (BNA)
  modified_base (19)..(19): 5-methyl modified nucleotide
  modified_base (20)..(20): bicyclic nucleic acid (BNA)
tcaaggaagatggcauuuct

SEQ ID NO: 22406 - DNA, 20 bp, Artificial Sequence
  source: /note="Description of Artificial Sequence: Synthetic oligonucleotide"
  source: /note="Description of Combined DNA/RNA Molecule: Synthetic oligonucleotide"
  source: /note="DNA/RNA"
  source: /note="5' tri-ethylene glycol (TEG)"
  modified_base (1)..(1): bicyclic nucleic acid (BNA)
  modified_base (2)..(2): 5-methyl bicyclic nucleic acid
  modified_base (6)..(6): bicyclic nucleic acid (BNA)
  modified_base (10)..(10): bicyclic nucleic acid (BNA)
  modified_base (14)..(14): 5-methyl modified nucleotide
  modified_base (15)..(15): bicyclic nucleic acid (BNA)
  modified_base (19)..(19): 5-methyl modified nucleotide
  modified_base (20)..(20): bicyclic nucleic acid (BNA)
tcaaggaagauggcauuuct

SEQ ID NO: 22407 - DNA, 20 bp, Artificial Sequence
  source: /note="Description of Artificial Sequence: Synthetic oligonucleotide"
  source: /note="Description of Combined DNA/RNA Molecule: Synthetic oligonucleotide"
  source: /note="DNA/RNA"
  source: /note="5' tri-ethylene glycol (TEG)"
  modified_base (1)..(1): bicyclic nucleic acid (BNA)
  modified_base (2)..(2): 5-methyl modified nucleotide
  modified_base (9)..(9): bicyclic nucleic acid (BNA)
  modified_base (14)..(14): 5-methyl modified nucleotide
  modified_base (19)..(19): 5-methyl modified nucleotide
  modified_base (20)..(20): bicyclic nucleic acid (BNA)
tcaaggaagauggcauuuct

SEQ ID NO: 22408 - DNA, 20 bp, Artificial Sequence
  source: /note="Description of Artificial Sequence: Synthetic oligonucleotide"
  source: /note="Description of Combined DNA/RNA Molecule: Synthetic oligonucleotide"
  source: /note="DNA/RNA"
  source: /note="5' tri-ethylene glycol (TEG)"
  modified_base (1)..(1): bicyclic nucleic acid (BNA)
  modified_base (2)..(2): 5-methyl modified nucleotide
  modified_base (13)..(13): bicyclic nucleic acid (BNA)
  modified_base (14)..(14): 5-methyl modified nucleotide
  modified_base (19)..(19): 5-methyl modified nucleotide
  modified_base (20)..(20): bicyclic nucleic acid (BNA)
tcaaggaagauggcauuuct

SEQ ID NO: 22409 - DNA, 20 bp, Artificial Sequence
  source: /note="Description of Artificial Sequence: Synthetic oligonucleotide"
  source: /note="Description of Combined DNA/RNA Molecule: Synthetic oligonucleotide"
  source: /note="DNA/RNA"
  source: /note="5' tri-ethylene glycol (TEG)"
  modified_base (1)..(1): bicyclic nucleic acid (BNA)
  modified_base (2)..(2): 5-methyl modified nucleotide
  modified_base (9)..(9): bicyclic nucleic acid (BNA)
  modified_base (13)..(13): bicyclic nucleic acid (BNA)
  modified_base (14)..(14): 5-methyl modified nucleotide
  modified_base (19)..(19): 5-methyl modified nucleotide
  modified_base (20)..(20): bicyclic nucleic acid (BNA)
tcaaggaagauggcauuuct

SEQ ID NO: 22410 - DNA, 20 bp, Artificial Sequence
  source: /note="Description of Artificial Sequence: Synthetic oligonucleotide"
  source: /note="Description of Combined DNA/RNA Molecule: Synthetic oligonucleotide"
  source: /note="DNA/RNA"
  source: /note="5' tri-ethylene glycol (TEG)"
  modified_base (1)..(1): bicyclic nucleic acid (BNA)
  modified_base (2)..(2): 5-methyl modified nucleotide
  modified_base (6)..(6): bicyclic nucleic acid (BNA)
  modified_base (9)..(9): bicyclic nucleic acid (BNA)
  modified_base (13)..(13): bicyclic nucleic acid (BNA)
  modified_base (14)..(14): 5-methyl modified nucleotide
  modified_base (19)..(19): 5-methyl modified nucleotide
  modified_base (20)..(20): bicyclic nucleic acid (BNA)
tcaaggaagauggcauuuct

SEQ ID NO: 22411 - DNA, 20 bp, Artificial Sequence
  source: /note="Description of Artificial Sequence: Synthetic oligonucleotide"
  source: /note="Description of Combined DNA/RNA Molecule: Synthetic oligonucleotide"
  source: /note="DNA/RNA"
  modified_base (1)..(1): bicyclic nucleic acid (BNA)
  modified_base (2)..(2): 5-methyl modified nucleotide
  modified_base (14)..(14): 5-methyl modified nucleotide
  modified_base (19)..(19): 5-methyl modified nucleotide
  source: /note="3' tri-ethylene glycol (TEG)"
tcaaggaagauggcauuucu

SEQ ID NO: 22412 - RNA, 20 nt, Artificial Sequence
  source: /note="Description of Artificial Sequence: Synthetic oligonucleotide"
  source: /note="RNA"
  modified_base (2)..(2): 5-methyl modified nucleotide
  modified_base (5)..(5): bicyclic nucleic acid (BNA)
  modified_base (14)..(14): 5-methyl modified nucleotide
  modified_base (19)..(19): 5-methyl modified nucleotide
  source: /note="3' tri-ethylene glycol (TEG)"
ucaaggaagauggcauuucu

SEQ ID NO: 22413 - DNA, 20 bp, Artificial Sequence
  source: /note="Description of Artificial Sequence: Synthetic oligonucleotide"
  source: /note="Description of Combined DNA/RNA Molecule: Synthetic oligonucleotide"
  source: /note="DNA/RNA"
  modified_base (1)..(1): bicyclic nucleic acid (BNA)
  modified_base (2)..(2): 5-methyl modified nucleotide
  modified_base (14)..(14): 5-methyl modified nucleotide
  modified_base (19)..(19): 5-methyl modified nucleotide
  modified_base (20)..(20): bicyclic nucleic acid (BNA)
  source: /note="3' tri-ethylene glycol (TEG)"
tcaaggaagauggcauuuct

SEQ ID NO: 22414 - DNA, 20 bp, Artificial Sequence
  source: /note="Description of Artificial Sequence: Synthetic oligonucleotide"
  source: /note="Description of Combined DNA/RNA Molecule: Synthetic oligonucleotide"
  source: /note="DNA/RNA"
  modified_base (1)..(1): bicyclic nucleic acid (BNA)
  modified_base (2)..(2): 5-methyl bicyclic nucleic acid
  modified_base (14)..(14): 5-methyl modified nucleotide
  modified_base (19)..(19): 5-methyl modified nucleotide
  source: /note="3' tri-ethylene glycol (TEG)"
tcaaggaagauggcauuucu

SEQ ID NO: 22415 - DNA, 20 bp, Artificial Sequence
  source: /note="Description of Artificial Sequence: Synthetic oligonucleotide"
  source: /note="Description of Combined DNA/RNA Molecule: Synthetic oligonucleotide"
  source: /note="DNA/RNA"
  modified_base (1)..(1): bicyclic nucleic acid (BNA)
  modified_base (2)..(2): 5-methyl bicyclic nucleic acid
  modified_base (13)..(13): bicyclic nucleic acid (BNA)
  modified_base (14)..(14): 5-methyl modified nucleotide
  modified_base (19)..(19): 5-methyl modified nucleotide
  source: /note="3' tri-ethylene glycol (TEG)"
tcaaggaagauggcauuucu

SEQ ID NO: 22416 - DNA, 20 bp, Artificial Sequence
  source: /note="Description of Artificial Sequence: Synthetic oligonucleotide"
  source: /note="Description of Combined DNA/RNA Molecule: Synthetic oligonucleotide"
  source: /note="DNA/RNA"
  modified_base (1)..(1): bicyclic nucleic acid (BNA)
  modified_base (2)..(2): 5-methyl bicyclic nucleic acid
  modified_base (14)..(14): 5-methyl modified nucleotide
  modified_base (19)..(19): 5-methyl modified nucleotide
  modified_base (20)..(20): bicyclic nucleic acid (BNA)
  source: /note="3' tri-ethylene glycol (TEG)"
tcaaggaagauggcauuuct

SEQ ID NO: 22417 - DNA, 20 bp, Artificial Sequence
  source: /note="Description of Artificial Sequence: Synthetic oligonucleotide"
  source: /note="Description of Combined DNA/RNA Molecule: Synthetic oligonucleotide"
  source: /note="DNA/RNA"
  modified_base (1)..(1): bicyclic nucleic acid (BNA)
  modified_base (2)..(2): 5-methyl bicyclic nucleic acid
  modified_base (10)..(10): bicyclic nucleic acid (BNA)
  modified_base (14)..(14): 5-methyl modified nucleotide
  modified_base (19)..(19): 5-methyl modified nucleotide
  modified_base (20)..(20): bicyclic nucleic acid (BNA)
  source: /note="3' tri-ethylene glycol (TEG)"
tcaaggaagauggcauuuct

SEQ ID NO: 22418 - DNA, 20 bp, Artificial Sequence
  source: /note="Description of Artificial Sequence: Synthetic oligonucleotide"
  source: /note="Description of Combined DNA/RNA Molecule: Synthetic oligonucleotide"
  source: /note="DNA/RNA"
  modified_base (1)..(1): bicyclic nucleic acid (BNA)
  modified_base (2)..(2): 5-methyl modified nucleotide
  modified_base (7)..(7): bicyclic nucleic acid (BNA)
  modified_base (14)..(14): 5-methyl modified nucleotide
  modified_base (15)..(15): bicyclic nucleic acid (BNA)
  modified_base (19)..(19): 5-methyl modified nucleotide
  modified_base (20)..(20): bicyclic nucleic acid (BNA)
  source: /note="3' tri-ethylene glycol (TEG)"
tcaaggaagauggcauuuct

SEQ ID NO: 22419 - DNA, 20 bp, Artificial Sequence
  source: /note="Description of Artificial Sequence: Synthetic oligonucleotide"
  source: /note="Description of Combined DNA/RNA Molecule: Synthetic oligonucleotide"
  source: /note="DNA/RNA"
  modified_base (1)..(1): bicyclic nucleic acid (BNA)
  modified_base (2)..(2): 5-methyl bicyclic nucleic acid
  modified_base (7)..(7): bicyclic nucleic acid (BNA)
  modified_base (14)..(14): 5-methyl modified nucleotide
  modified_base (15)..(15): bicyclic nucleic acid (BNA)
  modified_base (19)..(19): 5-methyl modified nucleotide
  modified_base (20)..(20): bicyclic nucleic acid (BNA)
  source: /note="3' tri-ethylene glycol (TEG)"
tcaaggaagauggcauuuct

SEQ ID NO: 22420 - DNA, 20 bp, Artificial Sequence
  source: /note="Description of Artificial Sequence: Synthetic oligonucleotide"
  source: /note="Description of Combined DNA/RNA Molecule: Synthetic oligonucleotide"
  source: /note="DNA/RNA"
  modified_base (1)..(1): bicyclic nucleic acid (BNA)
  modified_base (2)..(2): 5-methyl bicyclic nucleic acid
  modified_base (7)..(7): bicyclic nucleic acid (BNA)
  modified_base (11)..(11): bicyclic nucleic acid (BNA)
  modified_base (14)..(14): 5-methyl modified nucleotide
  modified_base (15)..(15): bicyclic nucleic acid (BNA)
  modified_base (19)..(19): 5-methyl modified nucleotide
  modified_base (20)..(20): bicyclic nucleic acid (BNA)
  source: /note="3' tri-ethylene glycol (TEG)"
tcaaggaagatggcauuuct

SEQ ID NO: 22421 - DNA, 20 bp, Artificial Sequence
  source: /note="Description of Artificial Sequence: Synthetic oligonucleotide"
  source: /note="Description of Combined DNA/RNA Molecule: Synthetic oligonucleotide"
  source: /note="DNA/RNA"
  modified_base (1)..(1): bicyclic nucleic acid (BNA)
  modified_base (2)..(2): 5-methyl bicyclic nucleic acid
  modified_base (6)..(6): bicyclic nucleic acid (BNA)
  modified_base (10)..(10): bicyclic nucleic acid (BNA)
  modified_base (14)..(14): 5-methyl modified nucleotide
  modified_base (15)..(15): bicyclic nucleic acid (BNA)
  modified_base (19)..(19): 5-methyl modified nucleotide
  modified_base (20)..(20): bicyclic nucleic acid (BNA)
  source: /note="3' tri-ethylene glycol (TEG)"
tcaaggaagauggcauuuct

SEQ ID NO: 22422 - DNA, 20 bp, Artificial Sequence
  source: /note="Description of Artificial Sequence: Synthetic oligonucleotide"
  source: /note="Description of Combined DNA/RNA Molecule: Synthetic oligonucleotide"
  source: /note="DNA/RNA"
  modified_base (1)..(1): bicyclic nucleic acid (BNA)
  modified_base (2)..(2): 5-methyl modified nucleotide
  modified_base (9)..(9): bicyclic nucleic acid (BNA)
  modified_base (14)..(14): 5-methyl modified nucleotide
  modified_base (19)..(19): 5-methyl modified nucleotide
  modified_base (20)..(20): bicyclic nucleic acid (BNA)
  source: /note="3' tri-ethylene glycol (TEG)"
tcaaggaagauggcauuuct

SEQ ID NO: 22423 - DNA, 20 bp, Artificial Sequence
  source: /note="Description of Artificial Sequence: Synthetic oligonucleotide"
  source: /note="Description of Combined DNA/RNA Molecule: Synthetic oligonucleotide"
  source: /note="DNA/RNA"
  modified_base (1)..(1): bicyclic nucleic acid (BNA)
  modified_base (2)..(2): 5-methyl modified nucleotide
  modified_base (13)..(13): bicyclic nucleic acid (BNA)
  modified_base (14)..(14): 5-methyl modified nucleotide
  modified_base (19)..(19): 5-methyl modified nucleotide
  modified_base (20)..(20): bicyclic nucleic acid (BNA)
  source: /note="3' tri-ethylene glycol (TEG)"
tcaaggaagauggcauuuct

SEQ ID NO: 22424 - DNA, 20 bp, Artificial Sequence
  source: /note="Description of Artificial Sequence: Synthetic oligonucleotide"
  source: /note="Description of Combined DNA/RNA Molecule: Synthetic oligonucleotide"
  source: /note="DNA/RNA"
  modified_base (1)..(1): bicyclic nucleic acid (BNA)
  modified_base (2)..(2): 5-methyl modified nucleotide
  modified_base (9)..(9): bicyclic nucleic acid (BNA)
  modified_base (13)..(13): bicyclic nucleic acid (BNA)
  modified_base (14)..(14): 5-methyl modified nucleotide
  modified_base (19)..(19): 5-methyl modified nucleotide
  modified_base (20)..(20): bicyclic nucleic acid (BNA)
  source: /note="3' tri-ethylene glycol (TEG)"
tcaaggaagauggcauuuct

SEQ ID NO: 22425 - DNA, 20 bp, Artificial Sequence
  source: /note="Description of Artificial Sequence: Synthetic oligonucleotide"
  source: /note="Description of Combined DNA/RNA Molecule: Synthetic oligonucleotide"
  source: /note="DNA/RNA"
  modified_base (1)..(1): bicyclic nucleic acid (BNA)
  modified_base (2)..(2): 5-methyl modified nucleotide
  modified_base (6)..(6): bicyclic nucleic acid (BNA)
  modified_base (9)..(9): bicyclic nucleic acid (BNA)
  modified_base (13)..(13): bicyclic nucleic acid (BNA)
  modified_base (14)..(14): 5-methyl modified nucleotide
  modified_base (19)..(19): 5-methyl modified nucleotide
  modified_base (20)..(20): bicyclic nucleic acid (BNA)
  source: /note="3' tri-ethylene glycol (TEG)"
tcaaggaagauggcauuuct

SEQ ID NO: 22426 - DNA, 20 bp, Artificial Sequence
  source: /note="Description of Artificial Sequence: Synthetic oligonucleotide"
  source: /note="Description of Combined DNA/RNA Molecule: Synthetic oligonucleotide"
  source: /note="DNA/RNA"
  source: /note="5' tri-ethylene glycol (TEG)"
  modified_base (1)..(1): bicyclic nucleic acid (BNA)
  modified_base (2)..(2): 5-methyl modified nucleotide
  modified_base (14)..(14): 5-methyl modified nucleotide
  modified_base (19)..(19): 5-methyl modified nucleotide
  source: /note="3' tri-ethylene glycol (TEG)"
tcaaggaagauggcauuucu

SEQ ID NO: 22427 - RNA, 20 nt, Artificial Sequence
  source: /note="Description of Artificial Sequence: Synthetic oligonucleotide"
  source: /note="RNA"
  source: /note="5' tri-ethylene glycol (TEG)"
  modified_base (2)..(2): 5-methyl modified nucleotide
  modified_base (5)..(5): bicyclic nucleic acid (BNA)
  modified_base (14)..(14): 5-methyl modified nucleotide
  modified_base (19)..(19): 5-methyl modified nucleotide
  source: /note="3' tri-ethylene glycol (TEG)"
ucaaggaagauggcauuucu

SEQ ID NO: 22428 - DNA, 20 bp, Artificial Sequence
  source: /note="Description of Artificial Sequence: Synthetic oligonucleotide"
  source: /note="Description of Combined DNA/RNA Molecule: Synthetic oligonucleotide"
  source: /note="DNA/RNA"
  source: /note="5' tri-ethylene glycol (TEG)"
  modified_base (1)..(1): bicyclic nucleic acid (BNA)
  modified_base (2)..(2): 5-methyl modified nucleotide
  modified_base (14)..(14): 5-methyl modified nucleotide
  modified_base (19)..(19): 5-methyl modified nucleotide
  modified_base (20)..(20): bicyclic nucleic acid (BNA)
  source: /note="3' tri-ethylene glycol (TEG)"
tcaaggaagauggcauuuct

SEQ ID NO: 22429 - DNA, 20 bp, Artificial Sequence
  source: /note="Description of Artificial Sequence: Synthetic oligonucleotide"
  source: /note="Description of Combined DNA/RNA Molecule: Synthetic oligonucleotide"
  source: /note="DNA/RNA"
  source: /note="5' tri-ethylene glycol (TEG)"
  modified_base (1)..(1): bicyclic nucleic acid (BNA)
  modified_base (2)..(2): 5-methyl bicyclic nucleic acid
  modified_base (14)..(14): 5-methyl modified nucleotide
  modified_base (19)..(19): 5-methyl modified nucleotide
  source: /note="3' tri-ethylene glycol (TEG)"
tcaaggaagauggcauuucu

SEQ ID NO: 22430 - DNA, 20 bp, Artificial Sequence
  source: /note="Description of Artificial Sequence: Synthetic oligonucleotide"
  source: /note="Description of Combined DNA/RNA Molecule: Synthetic oligonucleotide"
  source: /note="DNA/RNA"
  source: /note="5' tri-ethylene glycol (TEG)"
  modified_base (1)..(1): bicyclic nucleic acid (BNA)
  modified_base (2)..(2): 5-methyl bicyclic nucleic acid
  modified_base (13)..(13): bicyclic nucleic acid (BNA)
  modified_base (14)..(14): 5-methyl modified nucleotide
  modified_base (19)..(19): 5-methyl modified nucleotide
  source: /note="3' tri-ethylene glycol (TEG)"
tcaaggaagauggcauuucu

SEQ ID NO: 22431 - DNA, 20 bp, Artificial Sequence
  source: /note="Description of Artificial Sequence: Synthetic oligonucleotide"
  source: /note="Description of Combined DNA/RNA Molecule: Synthetic oligonucleotide"
  source: /note="DNA/RNA"
  source: /note="5' tri-ethylene glycol (TEG)"
  modified_base (1)..(1): bicyclic nucleic acid (BNA)
  modified_base (2)..(2): 5-methyl bicyclic nucleic acid
  modified_base (14)..(14): 5-methyl modified nucleotide
  modified_base (19)..(19): 5-methyl modified nucleotide
  modified_base (20)..(20): bicyclic nucleic acid (BNA)
  source: /note="3' tri-ethylene glycol (TEG)"
tcaaggaagauggcauuuct

SEQ ID NO: 22432 - DNA, 20 bp, Artificial Sequence
  source: /note="Description of Artificial Sequence: Synthetic oligonucleotide"
  source: /note="Description of Combined DNA/RNA Molecule: Synthetic oligonucleotide"
  source: /note="DNA/RNA"
  source: /note="5' tri-ethylene glycol (TEG)"
  modified_base (1)..(1): bicyclic nucleic acid (BNA)
  modified_base (2)..(2): 5-methyl bicyclic nucleic acid
  modified_base (10)..(10): bicyclic nucleic acid (BNA)
  modified_base (14)..(14): 5-methyl modified nucleotide
  modified_base (19)..(19): 5-methyl modified nucleotide
  modified_base (20)..(20): bicyclic nucleic acid (BNA)
  source: /note="3' tri-ethylene glycol (TEG)"
tcaaggaagauggcauuuct

SEQ ID NO: 22433 - DNA, 20 bp, Artificial Sequence
  source: /note="Description of Artificial Sequence: Synthetic oligonucleotide"
  source: /note="Description of Combined DNA/RNA Molecule: Synthetic oligonucleotide"
  source: /note="DNA/RNA"
  source: /note="5' tri-ethylene glycol (TEG)"
  modified_base (1)..(1): bicyclic nucleic acid (BNA)
  modified_base (2)..(2): 5-methyl modified nucleotide
  modified_base (7)..(7): bicyclic nucleic acid (BNA)
  modified_base (14)..(14): 5-methyl modified nucleotide
  modified_base (15)..(15): bicyclic nucleic acid (BNA)
  modified_base (19)..(19): 5-methyl modified nucleotide
  modified_base (20)..(20): bicyclic nucleic acid (BNA)
  source: /note="3' tri-ethylene glycol (TEG)"
tcaaggaagauggcauuuct

SEQ ID NO: 22434 - DNA, 20 bp, Artificial Sequence
  source: /note="Description of Artificial Sequence: Synthetic oligonucleotide"
  source: /note="Description of Combined DNA/RNA Molecule: Synthetic oligonucleotide"
  source: /note="DNA/RNA"
  source: /note="5' tri-ethylene glycol (TEG)"
  modified_base (1)..(1): bicyclic nucleic acid (BNA)
  modified_base (2)..(2): 5-methyl bicyclic nucleic acid
  modified_base (7)..(7): bicyclic nucleic acid (BNA)
  modified_base (14)..(14): 5-methyl modified nucleotide
  modified_base (15)..(15): bicyclic nucleic acid (BNA)
  modified_base (19)..(19): 5-methyl modified nucleotide
  modified_base (20)..(20): bicyclic nucleic acid (BNA)
  source: /note="3' tri-ethylene glycol (TEG)"
tcaaggaagauggcauuuct

SEQ ID NO: 22435 - DNA, 20 bp, Artificial Sequence
  source: /note="Description of Artificial Sequence: Synthetic oligonucleotide"
  source: /note="Description of Combined DNA/RNA Molecule: Synthetic oligonucleotide"
  source: /note="DNA/RNA"
  source: /note="5' tri-ethylene glycol (TEG)"
  modified_base (1)..(1): bicyclic nucleic acid (BNA)
  modified_base (2)..(2): 5-methyl bicyclic nucleic acid
  modified_base (7)..(7): bicyclic nucleic acid (BNA)
  modified_base (11)..(11): bicyclic nucleic acid (BNA)
  modified_base (14)..(14): 5-methyl modified nucleotide
  modified_base (15)..(15): bicyclic nucleic acid (BNA)
  modified_base (19)..(19): 5-methyl modified nucleotide
  modified_base (20)..(20): bicyclic nucleic acid (BNA)
  source: /note="3' tri-ethylene glycol (TEG)"
tcaaggaagatggcauuuct

SEQ ID NO: 22436 - DNA, 20 bp, Artificial Sequence
  source: /note="Description of Artificial Sequence: Synthetic oligonucleotide"
  source: /note="Description of Combined DNA/RNA Molecule: Synthetic oligonucleotide"
  source: /note="DNA/RNA"
  source: /note="5' tri-ethylene glycol (TEG)"
  modified_base (1)..(1): bicyclic nucleic acid (BNA)
  modified_base (2)..(2): 5-methyl bicyclic nucleic acid
  modified_base (6)..(6): bicyclic nucleic acid (BNA)
  modified_base (10)..(10): bicyclic nucleic acid (BNA)
  modified_base (14)..(14): 5-methyl modified nucleotide
  modified_base (15)..(15): bicyclic nucleic acid (BNA)
  modified_base (19)..(19): 5-methyl modified nucleotide
  modified_base (20)..(20): bicyclic nucleic acid (BNA)
  source: /note="3' tri-ethylene glycol (TEG)"
tcaaggaagauggcauuuct

SEQ ID NO: 22437 - DNA, 20 bp, Artificial Sequence
  source: /note="Description of Artificial Sequence: Synthetic oligonucleotide"
  source: /note="Description of Combined DNA/RNA Molecule: Synthetic oligonucleotide"
  source: /note="DNA/RNA"
  source: /note="5' tri-ethylene glycol (TEG)"
  modified_base (1)..(1): bicyclic nucleic acid (BNA)
  modified_base (2)..(2): 5-methyl modified nucleotide
  modified_base (9)..(9): bicyclic nucleic acid (BNA)
  modified_base (14)..(14): 5-methyl modified nucleotide
  modified_base (19)..(19): 5-methyl modified nucleotide
  modified_base (20)..(20): bicyclic nucleic acid (BNA)
  source: /note="3' tri-ethylene glycol (TEG)"
tcaaggaagauggcauuuct

SEQ ID NO: 22438 - DNA, 20 bp, Artificial Sequence
  source: /note="Description of Artificial Sequence: Synthetic oligonucleotide"
  source: /note="Description of Combined DNA/RNA Molecule: Synthetic oligonucleotide"
  source: /note="DNA/RNA"
  source: /note="5' tri-ethylene glycol (TEG)"
  modified_base (1)..(1): bicyclic nucleic acid (BNA)
  modified_base (2)..(2): 5-methyl modified nucleotide
  modified_base (13)..(13): bicyclic nucleic acid (BNA)
  modified_base (14)..(14): 5-methyl modified nucleotide
  modified_base (19)..(19): 5-methyl modified nucleotide
  modified_base (20)..(20): bicyclic nucleic acid (BNA)
  source: /note="3' tri-ethylene glycol (TEG)"
tcaaggaagauggcauuuct

SEQ ID NO: 22439 - DNA, 20 bp, Artificial Sequence
  source: /note="Description of Artificial Sequence: Synthetic oligonucleotide"
  source: /note="Description of Combined DNA/RNA Molecule: Synthetic oligonucleotide"
  source: /note="DNA/RNA"
  source: /note="5' tri-ethylene glycol (TEG)"
  modified_base (1)..(1): bicyclic nucleic acid (BNA)
  modified_base (2)..(2): 5-methyl modified nucleotide
  modified_base (9)..(9): bicyclic nucleic acid (BNA)
  modified_base (13)..(13): bicyclic nucleic acid (BNA)
  modified_base (14)..(14): 5-methyl modified nucleotide
  modified_base (19)..(19): 5-methyl modified nucleotide
  modified_base (20)..(20): bicyclic nucleic acid (BNA)
  source: /note="3' tri-ethylene glycol (TEG)"
tcaaggaagauggcauuuct

SEQ ID NO: 22440 - DNA, 20 bp, Artificial Sequence
  source: /note="Description of Artificial Sequence: Synthetic oligonucleotide"
  source: /note="Description of Combined DNA/RNA Molecule: Synthetic oligonucleotide"
  source: /note="DNA/RNA"
  source: /note="5' tri-ethylene glycol (TEG)"
  modified_base (1)..(1): bicyclic nucleic acid (BNA)
  modified_base (2)..(2): 5-methyl modified nucleotide
  modified_base (6)..(6): bicyclic nucleic acid (BNA)
  modified_base (9)..(9): bicyclic nucleic acid (BNA)
  modified_base (13)..(13): bicyclic nucleic acid (BNA)
  modified_base (14)..(14): 5-methyl modified nucleotide
  modified_base (19)..(19): 5-methyl modified nucleotide
  modified_base (20)..(20): bicyclic nucleic acid (BNA)
  source: /note="3' tri-ethylene glycol (TEG)"
tcaaggaagauggcauuuct

SEQ ID NO: 22441 - DNA, 22 bp, Artificial Sequence
  source: /note="Description of Artificial Sequence: Synthetic oligonucleotide"
  source: /note="Description of Combined DNA/RNA Molecule: Synthetic oligonucleotide"
  source: /note="DNA/RNA"
  modified_base (1)..(1): bicyclic nucleic acid (BNA)
  modified_base (2)..(2): 5-methyl modified nucleotide
  modified_base (14)..(14): 5-methyl modified nucleotide
  modified_base (19)..(19): 5-methyl modified nucleotide
tcaaggaagauggcauuucuag

SEQ ID NO: 22442 - DNA, 22 bp, Artificial Sequence
  source: /note="Description of Artificial Sequence: Synthetic oligonucleotide"
  source: /note="Description of Combined DNA/RNA Molecule: Synthetic oligonucleotide"
  source: /note="DNA/RNA"
  modified_base (1)..(1): bicyclic nucleic acid (BNA)
  modified_base (2)..(2): 5-methyl bicyclic nucleic acid
  modified_base (14)..(14): 5-methyl modified nucleotide
  modified_base (19)..(19): 5-methyl modified nucleotide
tcaaggaagauggcauuucuag

SEQ ID NO: 22443 - DNA, 22 bp, Artificial Sequence
  source: /note="Description of Artificial Sequence: Synthetic oligonucleotide"
  source: /note="Description of Combined DNA/RNA Molecule: Synthetic oligonucleotide"
  source: /note="DNA/RNA"
  modified_base (1)..(1): bicyclic nucleic acid (BNA)
  modified_base (2)..(2): 5-methyl modified nucleotide
  modified_base (14)..(14): 5-methyl modified nucleotide
  modified_base (19)..(19): 5-methyl modified nucleotide
  modified_base (22)..(22): bicyclic nucleic acid (BNA)
tcaaggaagauggcauuucuag

SEQ ID NO: 22444 - DNA, 22 bp, Artificial Sequence
  source: /note="Description of Artificial Sequence: Synthetic oligonucleotide"
  source: /note="Description of Combined DNA/RNA Molecule: Synthetic oligonucleotide"
  source: /note="DNA/RNA"
  modified_base (1)..(1): bicyclic nucleic acid (BNA)
  modified_base (2)..(2): 5-methyl bicyclic nucleic acid
  modified_base (14)..(14): 5-methyl modified nucleotide
  modified_base (19)..(19): 5-methyl modified nucleotide
  modified_base (22)..(22): bicyclic nucleic acid (BNA)
tcaaggaagauggcauuucuag

SEQ ID NO: 22445 - DNA, 22 bp, Artificial Sequence
  source: /note="Description of Artificial Sequence: Synthetic oligonucleotide"
  source: /note="Description of Combined DNA/RNA Molecule: Synthetic oligonucleotide"
  source: /note="DNA/RNA"
  modified_base (1)..(1): bicyclic nucleic acid (BNA)
  modified_base (2)..(2): 5-methyl bicyclic nucleic acid
  modified_base (10)..(10): bicyclic nucleic acid (BNA)
  modified_base (14)..(14): 5-methyl modified nucleotide
  modified_base (19)..(19): 5-methyl modified nucleotide
  modified_base (22)..(22): bicyclic nucleic acid (BNA)
tcaaggaagauggcauuucuag

SEQ ID NO: 22446 - DNA, 22 bp, Artificial Sequence
  source: /note="Description of Artificial Sequence: Synthetic oligonucleotide"
  source: /note="Description of Combined DNA/RNA Molecule: Synthetic oligonucleotide"
  source: /note="DNA/RNA"
  modified_base (1)..(1): bicyclic nucleic acid (BNA)
  modified_base (2)..(2): 5-methyl bicyclic nucleic acid
  modified_base (10)..(10): bicyclic nucleic acid (BNA)
  modified_base (14)..(14): 5-methyl modified nucleotide
  modified_base (15)..(15): bicyclic nucleic acid (BNA)
  modified_base (19)..(19): 5-methyl modified nucleotide
  modified_base (22)..(22): bicyclic nucleic acid (BNA)
tcaaggaagauggcauuucuag

SEQ ID NO: 22447 - DNA, 22 bp, Artificial Sequence
  source: /note="Description of Artificial Sequence: Synthetic oligonucleotide"
  source: /note="Description of Combined DNA/RNA Molecule: Synthetic oligonucleotide"
  source: /note="DNA/RNA"
  modified_base (1)..(1): bicyclic nucleic acid (BNA)
  modified_base (2)..(2): 5-methyl bicyclic nucleic acid
  modified_base (13)..(13): bicyclic nucleic acid (BNA)
  modified_base (14)..(14): 5-methyl modified nucleotide
  modified_base (19)..(19): 5-methyl modified nucleotide
  modified_base (22)..(22): bicyclic nucleic acid (BNA)
tcaaggaagauggcauuucuag

SEQ ID NO: 22448 - DNA, 22 bp, Artificial Sequence
  source: /note="Description of Artificial Sequence: Synthetic oligonucleotide"
  source: /note="Description of Combined DNA/RNA Molecule: Synthetic oligonucleotide"
  source: /note="DNA/RNA"
  modified_base (1)..(1): bicyclic nucleic acid (BNA)
  modified_base (2)..(2): 5-methyl bicyclic nucleic acid
  modified_base (9)..(9): bicyclic nucleic acid (BNA)
  modified_base (14)..(14): 5-methyl modified nucleotide
  modified_base (19)..(19): 5-methyl modified nucleotide
  modified_base (22)..(22): bicyclic nucleic acid (BNA)
tcaaggaagauggcauuucuag

SEQ ID NO: 22449 - DNA, 22 bp, Artificial Sequence
  source: /note="Description of Artificial Sequence: Synthetic oligonucleotide"
  source: /note="Description of Combined DNA/RNA Molecule: Synthetic oligonucleotide"
  source: /note="DNA/RNA"
  modified_base (1)..(1): bicyclic nucleic acid (BNA)
  modified_base (2)..(2): 5-methyl bicyclic nucleic acid
  modified_base (9)..(9): bicyclic nucleic acid (BNA)
  modified_base (13)..(13): bicyclic nucleic acid (BNA)
  modified_base (14)..(14): 5-methyl modified nucleotide
  modified_base (19)..(19): 5-methyl modified nucleotide
  modified_base (22)..(22): bicyclic nucleic acid (BNA)
tcaaggaagauggcauuucuag

SEQ ID NO: 22450 - DNA, 22 bp, Artificial Sequence
  source: /note="Description of Artificial Sequence: Synthetic oligonucleotide"
  source: /note="Description of Combined DNA/RNA Molecule: Synthetic oligonucleotide"
  source: /note="DNA/RNA"
  modified_base (1)..(1): bicyclic nucleic acid (BNA)
  modified_base (2)..(2): 5-methyl bicyclic nucleic acid
  modified_base (5)..(5): bicyclic nucleic acid (BNA)
  modified_base (9)..(9): bicyclic nucleic acid (BNA)
  modified_base (13)..(13): bicyclic nucleic acid (BNA)
  modified_base (14)..(14): 5-methyl modified nucleotide
  modified_base (19)..(19): 5-methyl modified nucleotide
  modified_base (22)..(22): bicyclic nucleic acid (BNA)
tcaaggaagauggcauuucuag

SEQ ID NO: 22451 - DNA, 22 bp, Artificial Sequence
  source: /note="Description of Artificial Sequence: Synthetic oligonucleotide"
  source: /note="Description of Combined DNA/RNA Molecule: Synthetic oligonucleotide"
  source: /note="DNA/RNA"
  source: /note="5' tri-ethylene glycol (TEG)"
  modified_base (1)..(1): bicyclic nucleic acid (BNA)
  modified_base (2)..(2): 5-methyl modified nucleotide
  modified_base (14)..(14): 5-methyl modified nucleotide
  modified_base (19)..(19): 5-methyl modified nucleotide
tcaaggaagauggcauuucuag

SEQ ID NO: 22452 - DNA, 22 bp, Artificial Sequence
  source: /note="Description of Artificial Sequence: Synthetic oligonucleotide"
  source: /note="Description of Combined DNA/RNA Molecule: Synthetic oligonucleotide"
  source: /note="DNA/RNA"
  source: /note="5' tri-ethylene glycol (TEG)"
  modified_base (1)..(1): bicyclic nucleic acid (BNA)
  modified_base (2)..(2): 5-methyl bicyclic nucleic acid
  modified_base (14)..(14): 5-methyl modified nucleotide
  modified_base (19)..(19): 5-methyl modified nucleotide
tcaaggaagauggcauuucuag

SEQ ID NO: 22453 - DNA, 22 bp, Artificial Sequence
  source: /note="Description of Artificial Sequence: Synthetic oligonucleotide"
  source: /note="Description of Combined DNA/RNA Molecule: Synthetic oligonucleotide"
  source: /note="DNA/RNA"
  source: /note="5' tri-ethylene glycol (TEG)"
  modified_base (1)..(1): bicyclic nucleic acid (BNA)
  modified_base (2)..(2): 5-methyl modified nucleotide
  modified_base (14)..(14): 5-methyl modified nucleotide
  modified_base (19)..(19): 5-methyl modified nucleotide
  modified_base (22)..(22): bicyclic nucleic acid (BNA)
tcaaggaagauggcauuucuag

SEQ ID NO: 22454 - DNA, 22 bp, Artificial Sequence
  source: /note="Description of Artificial Sequence: Synthetic oligonucleotide"
  source: /note="Description of Combined DNA/RNA Molecule: Synthetic oligonucleotide"
  source: /note="DNA/RNA"
  source: /note="5' tri-ethylene glycol (TEG)"
  modified_base (1)..(1): bicyclic nucleic acid (BNA)
  modified_base (2)..(2): 5-methyl bicyclic nucleic acid
  modified_base (14)..(14): 5-methyl modified nucleotide
  modified_base (19)..(19): 5-methyl modified nucleotide
  modified_base (22)..(22): bicyclic nucleic acid (BNA)
tcaaggaagauggcauuucuag

SEQ ID NO: 22455 - DNA, 22 bp, Artificial Sequence
  source: /note="Description of Artificial Sequence: Synthetic oligonucleotide"
  source: /note="Description of Combined DNA/RNA Molecule: Synthetic oligonucleotide"
  source: /note="DNA/RNA"
  source: /note="5' tri-ethylene glycol (TEG)"
  modified_base (1)..(1): bicyclic nucleic acid (BNA)
  modified_base (2)..(2): 5-methyl bicyclic nucleic acid
  modified_base (10)..(10): bicyclic nucleic acid (BNA)
  modified_base (14)..(14): 5-methyl modified nucleotide
  modified_base (19)..(19): 5-methyl modified nucleotide
  modified_base (22)..(22): bicyclic nucleic acid (BNA)
tcaaggaagauggcauuucuag

SEQ ID NO: 22456 - DNA, 22 bp, Artificial Sequence
  source: /note="Description of Artificial Sequence: Synthetic oligonucleotide"
  source: /note="Description of Combined DNA/RNA Molecule: Synthetic oligonucleotide"
  source: /note="DNA/RNA"
  source: /note="5' tri-ethylene glycol (TEG)"
  modified_base (1)..(1): bicyclic nucleic acid (BNA)
  modified_base (2)..(2): 5-methyl bicyclic nucleic acid
  modified_base (10)..(10): bicyclic nucleic acid (BNA)
  modified_base (14)..(14): 5-methyl modified nucleotide
  modified_base (15)..(15): bicyclic nucleic acid (BNA)
  modified_base (19)..(19): 5-methyl modified nucleotide
  modified_base (22)..(22): bicyclic nucleic acid (BNA)
tcaaggaagauggcauuucuag

SEQ ID NO: 22457 - DNA, 22 bp, Artificial Sequence
  source: /note="Description of Artificial Sequence: Synthetic oligonucleotide"
  source: /note="Description of Combined DNA/RNA Molecule: Synthetic oligonucleotide"
  source: /note="DNA/RNA"
  source: /note="5' tri-ethylene glycol (TEG)"
  modified_base (1)..(1): bicyclic nucleic acid (BNA)
  modified_base (2)..(2): 5-methyl bicyclic nucleic acid
  modified_base (13)..(13): bicyclic nucleic acid (BNA)
  modified_base (14)..(14): 5-methyl modified nucleotide
  modified_base (19)..(19): 5-methyl modified nucleotide
  modified_base (22)..(22): bicyclic nucleic acid (BNA)
tcaaggaagauggcauuucuag

SEQ ID NO: 22458 - DNA, 22 bp, Artificial Sequence
  source: /note="Description of Artificial Sequence: Synthetic oligonucleotide"
  source: /note="Description of Combined DNA/RNA Molecule: Synthetic oligonucleotide"
  source: /note="DNA/RNA"
  source: /note="5' tri-ethylene glycol (TEG)"
  modified_base (1)..(1): bicyclic nucleic acid (BNA)
  modified_base (2)..(2): 5-methyl bicyclic nucleic acid
  modified_base (9)..(9): bicyclic nucleic acid (BNA)
  modified_base (14)..(14): 5-methyl modified nucleotide
  modified_base (19)..(19): 5-methyl modified nucleotide
  modified_base (22)..(22): bicyclic nucleic acid (BNA)
tcaaggaagauggcauuucuag

SEQ ID NO: 22459 - DNA, 22 bp, Artificial Sequence
  source: /note="Description of Artificial Sequence: Synthetic oligonucleotide"
  source: /note="Description of Combined DNA/RNA Molecule: Synthetic oligonucleotide"
  source: /note="DNA/RNA"
  source: /note="5' tri-ethylene glycol (TEG)"
  modified_base (1)..(1): bicyclic nucleic acid (BNA)
  modified_base (2)..(2): 5-methyl bicyclic nucleic acid
  modified_base (9)..(9): bicyclic nucleic acid (BNA)
  modified_base (13)..(13): bicyclic nucleic acid (BNA)
  modified_base (14)..(14): 5-methyl modified nucleotide
  modified_base (19)..(19): 5-methyl modified nucleotide
  modified_base (22)..(22): bicyclic nucleic acid (BNA)
tcaaggaagauggcauuucuag

SEQ ID NO: 22460 - DNA, 22 bp, Artificial Sequence
  source: /note="Description of Artificial Sequence: Synthetic oligonucleotide"
  source: /note="Description of Combined DNA/RNA Molecule: Synthetic oligonucleotide"
  source: /note="DNA/RNA"
  source: /note="5' tri-ethylene glycol (TEG)"
  modified_base (1)..(1): bicyclic nucleic acid (BNA)
  modified_base (2)..(2): 5-methyl bicyclic nucleic acid
  modified_base (5)..(5): bicyclic nucleic acid (BNA)
  modified_base (9)..(9): bicyclic nucleic acid (BNA)
  modified_base (13)..(13): bicyclic nucleic acid (BNA)
  modified_base (14)..(14): 5-methyl modified nucleotide
  modified_base (19)..(19): 5-methyl modified nucleotide
  modified_base (22)..(22): bicyclic nucleic acid (BNA)
tcaaggaagauggcauuucuag

SEQ ID NO: 22461 - DNA, 22 bp, Artificial Sequence
  source: /note="Description of Artificial Sequence: Synthetic oligonucleotide"
  source: /note="Description of Combined DNA/RNA Molecule: Synthetic oligonucleotide"
  source: /note="DNA/RNA"
  modified_base (1)..(1): bicyclic nucleic acid (BNA)
  modified_base (2)..(2): 5-methyl modified nucleotide
  modified_base (14)..(14): 5-methyl modified nucleotide
  modified_base (19)..(19): 5-methyl modified nucleotide
  source: /note="3' tri-ethylene glycol (TEG)"
tcaaggaagauggcauuucuag

SEQ ID NO: 22462 - DNA, 22 bp, Artificial Sequence
  source: /note="Description of Artificial Sequence: Synthetic oligonucleotide"
  source: /note="Description of Combined DNA/RNA Molecule: Synthetic oligonucleotide"
  source: /note="DNA/RNA"
  modified_base (1)..(1): bicyclic nucleic acid (BNA)
  modified_base (2)..(2): 5-methyl bicyclic nucleic acid
  modified_base (14)..(14): 5-methyl modified nucleotide
  modified_base (19)..(19): 5-methyl modified nucleotide
  source: /note="3' tri-ethylene glycol (TEG)"
tcaaggaagauggcauuucuag

SEQ ID NO: 22463 - DNA, 22 bp, Artificial Sequence
  source: /note="Description of Artificial Sequence: Synthetic oligonucleotide"
  source: /note="Description of Combined DNA/RNA Molecule: Synthetic oligonucleotide"
  source: /note="DNA/RNA"
  modified_base (1)..(1): bicyclic nucleic acid (BNA)
  modified_base (2)..(2): 5-methyl modified nucleotide
  modified_base (14)..(14): 5-methyl modified nucleotide
  modified_base (19)..(19): 5-methyl modified nucleotide
  modified_base (22)..(22): bicyclic nucleic acid (BNA)
  source: /note="3' tri-ethylene glycol (TEG)"
tcaaggaagauggcauuucuag

SEQ ID NO: 22464 - DNA, 22 bp, Artificial Sequence
  source: /note="Description of Artificial Sequence: Synthetic oligonucleotide"
  source: /note="Description of Combined DNA/RNA Molecule: Synthetic oligonucleotide"
  source: /note="DNA/RNA"
  modified_base (1)..(1): bicyclic nucleic acid (BNA)
  modified_base (2)..(2): 5-methyl bicyclic nucleic acid
  modified_base (14)..(14): 5-methyl modified nucleotide
  modified_base (19)..(19): 5-methyl modified nucleotide
  modified_base (22)..(22): bicyclic nucleic acid (BNA)
  source: /note="3' tri-ethylene glycol (TEG)"
tcaaggaagauggcauuucuag

SEQ ID NO: 22465 - DNA, 22 bp, Artificial Sequence
  source: /note="Description of Artificial Sequence: Synthetic oligonucleotide"
  source: /note="Description of Combined DNA/RNA Molecule: Synthetic oligonucleotide"
  source: /note="DNA/RNA"
  modified_base (1)..(1): bicyclic nucleic acid (BNA)
  modified_base (2)..(2): 5-methyl bicyclic nucleic acid
  modified_base (10)..(10): bicyclic nucleic acid (BNA)
  modified_base (14)..(14): 5-methyl modified nucleotide
  modified_base (19)..(19): 5-methyl modified nucleotide
  modified_base (22)..(22): bicyclic nucleic acid (BNA)
  source: /note="3' tri-ethylene glycol (TEG)"
tcaaggaagauggcauuucuag

SEQ ID NO: 22466 - DNA, 22 bp, Artificial Sequence
  source: /note="Description of Artificial Sequence: Synthetic oligonucleotide"
  source: /note="Description of Combined DNA/RNA Molecule: Synthetic oligonucleotide"
  source: /note="DNA/RNA"
  modified_base (1)..(1): bicyclic nucleic acid (BNA)
  modified_base (2)..(2): 5-methyl bicyclic nucleic acid
  modified_base (10)..(10): bicyclic nucleic acid (BNA)
  modified_base (14)..(14): 5-methyl modified nucleotide
  modified_base (15)..(15): bicyclic nucleic acid (BNA)
  modified_base (19)..(19): 5-methyl modified nucleotide
  modified_base (22)..(22): bicyclic nucleic acid (BNA)
  source: /note="3' tri-ethylene glycol (TEG)"
tcaaggaagauggcauuucuag

SEQ ID NO: 22467 - DNA, 22 bp, Artificial Sequence
  source: /note="Description of Artificial Sequence: Synthetic oligonucleotide"
  source: /note="Description of Combined DNA/RNA Molecule: Synthetic oligonucleotide"
  source: /note="DNA/RNA"
  modified_base (1)..(1): bicyclic nucleic acid (BNA)
  modified_base (2)..(2): 5-methyl bicyclic nucleic acid
  modified_base (13)..(13): bicyclic nucleic acid (BNA)
  modified_base (14)..(14): 5-methyl modified nucleotide
  modified_base (19)..(19): 5-methyl modified nucleotide
  modified_base (22)..(22): bicyclic nucleic acid (BNA)
  source: /note="3' tri-ethylene glycol (TEG)"
tcaaggaagauggcauuucuag

SEQ ID NO: 22468 - DNA, 22 bp, Artificial Sequence
  source: /note="Description of Artificial Sequence: Synthetic oligonucleotide"
  source: /note="Description of Combined DNA/RNA Molecule: Synthetic oligonucleotide"
  source: /note="DNA/RNA"
  modified_base (1)..(1): bicyclic nucleic acid (BNA)
  modified_base (2)..(2): 5-methyl bicyclic nucleic acid
  modified_base (9)..(9): bicyclic nucleic acid (BNA)
  modified_base (14)..(14): 5-methyl modified nucleotide
  modified_base (19)..(19): 5-methyl modified nucleotide
  modified_base (22)..(22): bicyclic nucleic acid (BNA)
  source: /note="3' tri-ethylene glycol (TEG)"
tcaaggaagauggcauuucuag

SEQ ID NO: 22469 - DNA, 22 bp, Artificial Sequence
  source: /note="Description of Artificial Sequence: Synthetic oligonucleotide"
  source: /note="Description of Combined DNA/RNA Molecule: Synthetic oligonucleotide"
  source: /note="DNA/RNA"
  modified_base (1)..(1): bicyclic nucleic acid (BNA)
  modified_base (2)..(2): 5-methyl bicyclic nucleic acid
  modified_base (9)..(9): bicyclic nucleic acid (BNA)
  modified_base (13)..(13): bicyclic nucleic acid (BNA)
  modified_base (14)..(14): 5-methyl modified nucleotide
  modified_base (19)..(19): 5-methyl modified nucleotide
  modified_base (22)..(22): bicyclic nucleic acid (BNA)
  source: /note="3' tri-ethylene glycol (TEG)"
tcaaggaagauggcauuucuag

SEQ ID NO: 22470 - DNA, 22 bp, Artificial Sequence
  source: /note="Description of Artificial Sequence: Synthetic oligonucleotide"
  source: /note="Description of Combined DNA/RNA Molecule: Synthetic oligonucleotide"
  source: /note="DNA/RNA"
  modified_base (1)..(1): bicyclic nucleic acid (BNA)
  modified_base (2)..(2): 5-methyl bicyclic nucleic acid
  modified_base (5)..(5): bicyclic nucleic acid (BNA)
  modified_base (9)..(9): bicyclic nucleic acid (BNA)
  modified_base (13)..(13): bicyclic nucleic acid (BNA)
  modified_base (14)..(14): 5-methyl modified nucleotide
  modified_base (19)..(19): 5-methyl modified nucleotide
  modified_base (22)..(22): bicyclic nucleic acid (BNA)
  source: /note="3' tri-ethylene glycol (TEG)"
tcaaggaagauggcauuucuag

SEQ ID NO: 22471 - DNA, 22 bp, Artificial Sequence
  source: /note="Description of Artificial Sequence: Synthetic oligonucleotide"
  source: /note="Description of Combined DNA/RNA Molecule: Synthetic oligonucleotide"
  source: /note="DNA/RNA"
  source: /note="5' tri-ethylene glycol (TEG)"
  modified_base (1)..(1): bicyclic nucleic acid (BNA)
  modified_base (2)..(2): 5-methyl modified nucleotide
  modified_base (14)..(14): 5-methyl modified nucleotide
  modified_base (19)..(19): 5-methyl modified nucleotide
  source: /note="3' tri-ethylene glycol (TEG)"
tcaaggaagauggcauuucuag

SEQ ID NO: 22472 - DNA, 22 bp, Artificial Sequence
  source: /note="Description of Artificial Sequence: Synthetic oligonucleotide"
  source: /note="Description of Combined DNA/RNA Molecule: Synthetic oligonucleotide"
  source: /note="DNA/RNA"
  source: /note="5' tri-ethylene glycol (TEG)"
  modified_base (1)..(1): bicyclic nucleic acid (BNA)
  modified_base (2)..(2): 5-methyl bicyclic nucleic acid
  modified_base (14)..(14): 5-methyl modified nucleotide
  modified_base (19)..(19): 5-methyl modified nucleotide
  source: /note="3' tri-ethylene glycol (TEG)"
tcaaggaagauggcauuucuag

SEQ ID NO: 22473 - DNA, 22 bp, Artificial Sequence
  source: /note="Description of Artificial Sequence: Synthetic oligonucleotide"
  source: /note="Description of Combined DNA/RNA Molecule: Synthetic oligonucleotide"
  source: /note="DNA/RNA"
  source: /note="5' tri-ethylene glycol (TEG)"
  modified_base (1)..(1): bicyclic nucleic acid (BNA)
  modified_base (2)..(2): 5-methyl modified nucleotide
  modified_base (14)..(14): 5-methyl modified nucleotide
  modified_base (19)..(19): 5-methyl modified nucleotide
  modified_base (22)..(22): bicyclic nucleic acid (BNA)
  source: /note="3' tri-ethylene glycol (TEG)"
tcaaggaagauggcauuucuag

SEQ ID NO: 22474 - DNA, 22 bp, Artificial Sequence
  source: /note="Description of Artificial Sequence: Synthetic oligonucleotide"
  source: /note="Description of Combined DNA/RNA Molecule: Synthetic oligonucleotide"
  source: /note="DNA/RNA"
  source: /note="5' tri-ethylene glycol (TEG)"
  modified_base (1)..(1): bicyclic nucleic acid (BNA)
  modified_base (2)..(2): 5-methyl bicyclic nucleic acid
  modified_base (14)..(14): 5-methyl modified nucleotide
  modified_base (19)..(19): 5-methyl modified nucleotide
  modified_base (22)..(22): bicyclic nucleic acid (BNA)
  source: /note="3' tri-ethylene glycol (TEG)"
tcaaggaagauggcauuucuag

SEQ ID NO: 22475 - DNA, 22 bp, Artificial Sequence
  source: /note="Description of Artificial Sequence: Synthetic oligonucleotide"
  source: /note="Description of Combined DNA/RNA Molecule: Synthetic oligonucleotide"
  source: /note="DNA/RNA"
  source: /note="5' tri-ethylene glycol (TEG)"
  modified_base (1)..(1): bicyclic nucleic acid (BNA)
  modified_base (2)..(2): 5-methyl bicyclic nucleic acid
  modified_base (10)..(10): bicyclic nucleic acid (BNA)
  modified_base (14)..(14): 5-methyl modified nucleotide
  modified_base (19)..(19): 5-methyl modified nucleotide
  modified_base (22)..(22): bicyclic nucleic acid (BNA)
  source: /note="3' tri-ethylene glycol (TEG)"
tcaaggaagauggcauuucuag

SEQ ID NO: 22476 - DNA, 22 bp, Artificial Sequence
  source: /note="Description of Artificial Sequence: Synthetic oligonucleotide"
  source: /note="Description of Combined DNA/RNA Molecule: Synthetic oligonucleotide"
  source: /note="DNA/RNA"
  source: /note="5' tri-ethylene glycol (TEG)"
  modified_base (1)..(1): bicyclic nucleic acid (BNA)
  modified_base (2)..(2): 5-methyl bicyclic nucleic acid
  modified_base (10)..(10): bicyclic nucleic acid (BNA)
  modified_base (14)..(14): 5-methyl modified nucleotide
  modified_base (15)..(15): bicyclic nucleic acid (BNA)
  modified_base (19)..(19): 5-methyl modified nucleotide
  modified_base (22)..(22): bicyclic nucleic acid (BNA)
  source: /note="3' tri-ethylene glycol (TEG)"
tcaaggaagauggcauuucuag

SEQ ID NO: 22477 - DNA, 22 bp, Artificial Sequence
  source: /note="Description of Artificial Sequence: Synthetic oligonucleotide"
  source: /note="Description of Combined DNA/RNA Molecule: Synthetic oligonucleotide"
  source: /note="DNA/RNA"
  source: /note="5' tri-ethylene glycol (TEG)"
  modified_base (1)..(1): bicyclic nucleic acid (BNA)
  modified_base (2)..(2): 5-methyl bicyclic nucleic acid
  modified_base (13)..(13): bicyclic nucleic acid (BNA)
  modified_base (14)..(14): 5-methyl modified nucleotide
  modified_base (19)..(19): 5-methyl modified nucleotide
  modified_base (22)..(22): bicyclic nucleic acid (BNA)
  source: /note="3' tri-ethylene glycol (TEG)"
tcaaggaagauggcauuucuag

SEQ ID NO: 22478 - DNA, 22 bp, Artificial Sequence
  source: /note="Description of Artificial Sequence: Synthetic oligonucleotide"
  source: /note="Description of Combined DNA/RNA Molecule: Synthetic oligonucleotide"
  source: /note="DNA/RNA"
  source: /note="5' tri-ethylene glycol (TEG)"
  modified_base (1)..(1): bicyclic nucleic acid (BNA)
  modified_base (2)..(2): 5-methyl bicyclic nucleic acid
  modified_base (9)..(9): bicyclic nucleic acid (BNA)
  modified_base (14)..(14): 5-methyl modified nucleotide
  modified_base (19)..(19): 5-methyl modified nucleotide
  modified_base (22)..(22): bicyclic nucleic acid (BNA)
  source: /note="3' tri-ethylene glycol (TEG)"
tcaaggaagauggcauuucuag

SEQ ID NO: 22479 - DNA, 22 bp, Artificial Sequence
  source: /note="Description of Artificial Sequence: Synthetic oligonucleotide"
  source: /note="Description of Combined DNA/RNA Molecule: Synthetic oligonucleotide"
  source: /note="DNA/RNA"
  source: /note="5' tri-ethylene glycol (TEG)"
  modified_base (1)..(1): bicyclic nucleic acid (BNA)
  modified_base (2)..(2): 5-methyl bicyclic nucleic acid
  modified_base (9)..(9): bicyclic nucleic acid (BNA)
  modified_base (13)..(13): bicyclic nucleic acid (BNA)
  modified_base (14)..(14): 5-methyl modified nucleotide
  modified_base (19)..(19): 5-methyl modified nucleotide
  modified_base (22)..(22): bicyclic nucleic acid (BNA)
  source: /note="3' tri-ethylene glycol (TEG)"
tcaaggaagauggcauuucuag

SEQ ID NO: 22480 - DNA, 22 bp, Artificial Sequence
  source: /note="Description of Artificial Sequence: Synthetic oligonucleotide"
  source: /note="Description of Combined DNA/RNA Molecule: Synthetic oligonucleotide"
  source: /note="DNA/RNA"
  source: /note="5' tri-ethylene glycol (TEG)"
  modified_base (1)..(1): bicyclic nucleic acid (BNA)
  modified_base (2)..(2): 5-methyl bicyclic nucleic acid
  modified_base (5)..(5): bicyclic nucleic acid (BNA)
  modified_base (9)..(9): bicyclic nucleic acid (BNA)
  modified_base (13)..(13): bicyclic nucleic acid (BNA)
  modified_base (14)..(14): 5-methyl modified nucleotide
  modified_base (19)..(19): 5-methyl modified nucleotide
  modified_base (22)..(22): bicyclic nucleic acid (BNA)
  source: /note="3' tri-ethylene glycol (TEG)"
tcaaggaagauggcauuucuag

SEQ ID NO: 22481 - DNA, 26 bp, Artificial Sequence
  source: /note="Description of Artificial Sequence: Synthetic oligonucleotide"
  source: /note="primer"
tgaaaataagctcaagcagacaaatc

SEQ ID NO: 22482 - DNA, 20 bp, Artificial Sequence
  source: /note="Description of Artificial Sequence: Synthetic oligonucleotide"
  source: /note="primer"
gacgcctctgttccaaatcc

SEQ ID NO: 22483 - DNA, 18 bp, Artificial Sequence
  source: /note="Description of Artificial Sequence: Synthetic oligonucleotide"
  source: /note="primer"
cagtggataaaggcaaca

SEQ ID NO: 22484 - DNA, 21 bp, Artificial Sequence
  source: /note="Description of Artificial Sequence: Synthetic oligonucleotide"
  source: /note="primer"
gtgatggtgggtgaccttgag

SEQ ID NO: 22485 - DNA, 17 bp, Artificial Sequence
  source: /note="Description of Artificial Sequence: Synthetic oligonucleotide"
  source: /note="primer"
caagcagaaggcaacaa

SEQ ID NO: 22486 - RNA, 18 nt, Artificial Sequence
  source: /note="Description of Artificial Sequence: Synthetic oligonucleotide"
  source: /note="RNA"
  modified_base (1)..(1): bicyclic nucleic acid (BNA)
  modified_base (2)..(2): bicyclic nucleic acid (BNA)
  modified_base (3)..(3): 5-methyl modified nucleotide
  modified_base (6)..(6): bicyclic nucleic acid (BNA)
  modified_base (7)..(8): 5-methyl modified nucleotide
  modified_base (9)..(9): 5-methyl modified nucleotide
  modified_base (10)..(10): 5-methyl modified nucleotide
  modified_base (13)..(13): 5-methyl modified nucleotide
  modified_base (14)..(14): 5-methyl modified nucleotide
  modified_base (18)..(18): 5-methyl bicyclic nucleic acid
gguaaguucuguccaagc

SEQ ID NO: 22487 - RNA, 18 nt, Artificial Sequence
  source: /note="Description of Artificial Sequence: Synthetic oligonucleotide"
  source: /note="RNA"
  modified_base (1)..(1): bicyclic nucleic acid (BNA)
  modified_base (2)..(2): bicyclic nucleic acid (BNA)
  modified_base (6)..(6): bicyclic nucleic acid (BNA)
  modified_base (7)..(8): 5-methyl modified nucleotide
  modified_base (10)..(10): 5-methyl modified nucleotide
  modified_base (12)..(12): 5-methyl modified nucleotide
  modified_base (18)..(18): 5-methyl bicyclic nucleic acid
gguaaguucuguccaagc

SEQ ID NO: 22488 - RNA, 17 nt, Artificial Sequence
  source: /note="Description of Artificial Sequence: Synthetic oligonucleotide"
  source: /note="RNA"
  source: /note="5' tri-ethylene glycol (TEG)"
  modified_base (1)..(1): bicyclic nucleic acid (BNA)
  modified_base (2)..(2): bicyclic nucleic acid (BNA)
  modified_base (6)..(6): bicyclic nucleic acid (BNA)
  modified_base (9)..(9): 5-methyl modified nucleotide
  modified_base (13)..(13): 5-methyl modified nucleotide
  modified_base (14)..(14): 5-methyl modified nucleotide
gguaaguucuguccaag

SEQ ID NO: 22489 - RNA, 16 nt, Artificial Sequence
  source: /note="Description of Artificial Sequence: Synthetic oligonucleotide"
  source: /note="RNA"
  source: /note="5' tri-ethylene glycol (TEG)"
  modified_base (1)..(1): bicyclic nucleic acid (BNA)
  modified_base (2)..(2): bicyclic nucleic acid (BNA)
  modified_base (6)..(6): bicyclic nucleic acid (BNA)
  modified_base (9)..(9): 5-methyl modified nucleotide
  modified_base (13)..(13): 5-methyl modified nucleotide
  modified_base (14)..(14): 5-methyl modified nucleotide
gguaaguucuguccaa

SEQ ID NO: 22490 - RNA, 18 nt, Artificial Sequence
  source: /note="Description of Artificial Sequence: Synthetic oligonucleotide"
  source: /note="RNA"
  source: /note="5' tri-ethylene glycol (TEG)"
  modified_base (1)..(1): bicyclic nucleic acid (BNA)
  modified_base (2)..(2): bicyclic nucleic acid (BNA)
  modified_base (3)..(5): 2'-O-methoxyethyl modified nucleotide
  modified_base (6)..(6): bicyclic nucleic acid (BNA)
  modified_base (7)..(8): 2'-O-methoxyethyl modified nucleotide
  modified_base (9)..(9): 5-methyl 2'-O-methoxyethyl modified nucleotide
  modified_base (10)..(12): 2'-O-methoxyethyl modified nucleotide
  modified_base (13)..(13): 5-methyl 2'-O-methoxyethyl modified nucleotide
  modified_base (14)..(14): 5-methyl 2'-O-methoxyethyl modified nucleotide
  modified_base (15)..(17): 2'-O-methoxyethyl modified nucleotide
  modified_base (18)..(18): 5-methyl bicyclic nucleic acid
gguaaguucuguccaagc
